United States Patent Application Publication US 2026/0357256 A1 - sequence listing, part 23

SEQ ID NO: 9 - DNA, 58617616 bp, Homo sapiens (residues 47,762,507-49,933,529 of 58,617,616)
  source 1..58617616: mol_type = genomic DNA
cactacactctagcctgggcaacagagtgagaccctgtctattttttttcctttttgagtctcgctctgtcacccaggctggagtgcaatgatgcgatcctggctcactgtaatctccgccaccctgtctctttaaaaaacaaaaacaaaaacaaaaacaaaccatggagaccatctgtaggcagcagtatggggttgtgaagagcatggtggagtccgtgtcctgatttcagacccgctctgttacatactggctgtgtgatgttgtgcaggttactcaacctctctgtgcctcagtgtcatatctgtaaaatggacataacaatagtgcttatcttgctgtgggttattacaaggatgagtgagtctgcacggaaagcgatcggaacaggccctggcacaggggaagctctaggtgagcatttgctgttataacaatgttagggtaggggaagatgattttaaaaagatgcagaaacttgcaatttgtgccagaggctcctcccaaatgctctgaccctttgacgcagtgattgcacgcttgggaacgtggcctacagaaacagccggaagttggggaagagcattttgcacaggccggtccttgagaacgttctgcagaatgggaggaaacgtggtcatggacatggggcgggccctggccacatggacgccacctctgtggccattaactgaggggtcggaagtgcctgcagccactgggaggtgtttgtgtttggatactttgtgggaaaaagcaaacaggatctgctgccgtccacactggcgttcatcagacaaacccccatgccaaaagtctcttgagtgggaggatttcagaggactccttcttactcttttttccagcatttccaatttttttttttttttttgagaaagggtctcattctggagcacagtggctctgtctcagctcactgcagcctcaacctcctgggcttaagtgatcccctaaactcagcctcctgagtagctgagacttacaggcccacgccaccatgcctggctaatttttttctttttgtatttttagtagagacagggttttgccatgttgcccaggctggtctcaaactcctgaccccaagtgatccacccacctcggcctcccaaagtgctgggattacagatgtgagccattgagccaggccccaaattttctgtaatggagcaaacttgaaaaaaaaggaatcgacaggattcttcctttgtttttgtttttgagatagaatcttgctctgtcccccaggctggagtgcagtggcaccatctcggctcactgcaacctctgcctcccgggttcaagcgattctcctgccttagcctcccgagtagctgggattataggcatgtgtcaccacgcctggctaatttttgtctttttggtaaagactgggttttgccatgttggccaggctgttctcgaactcctgacctcaggtgatctacccgcctcggcctcccagagtgctgggattacaggtgtgagccaccacgccctgcctggcggatttttattttcttccttagatctgcttttctgtgtcctctccacgtgctcccacgctcttcgtggtggtgggtgctgggtgggcagggctgacctccctccatcctttcatcagaggttagaagcaacatctgtatttcccagacacctcagcagctgggattctggatgagaattcggtgccaacaattagagacaccctgtgaggcgtggacggcaggagtgatcccggaattgcagctggacctggcgtccttgaaccgagcagttccagcagcggaactggagacagcagtgcccctgctgggtcagttcagtgctgtcctgggtgtcatttctgagggcttggcctagagctgctgcttccgcttcccatgattttttttttttttgagacggagtcttgctctgtcacccaggctggagtgcagtggcgtgatctcagctcactgcaagctctgcttccctggttcacgccattctgcctcagcctcccgagtagctgggaccacaggcgcccgccaccgtgcccggctaattttttcaattttttttagtagagacagggttttactgtgttagccaggatggtctcgatttcctgacctcgtgatccgcccgcctcggcctcccaaaatgctgggattacaggtgtgagccaccgcgcccggccagcttcccatgattttgtaagcactcaattccctgtaagatacctggagtggtttctatttaggtgctagagacaatcatgcattacagttttttttttttttttttttttttttttttttggagacagggtcttgctctgttgcccaggctggagtgcagtggtgcgatcatggttcactgcaagctccacctccccaggctctggtgatccccccacctcagccccccaagtagctgggaccacaggtgcatgccattatgcctggctaatttttgttattttagtggagatggggtctccccatgttgcccaggctggtctcaaactcctagactcaagtgatcctcttgcctcagcctcccaaggaccgaattaaaggcatgagccatcttgctcagactcct[133 bp omitted]aaccctgcctctattaaaaatacaaaaattagctggacgtggtggtgggcgcccgtaatcccagctgctcaggaggctgaggcaggagaatcacttgaacgcgggaggcagaggttgcagtgagctgagatcccaccactgcactccagcctgggggacagagcgagactctgtctcaaaaaagaaaaaagaaaaaaaaaaatccatgttaatgggtagacacaactcaagtgagagtaggttttggggcagagaaattcagatgaggctttggctggattaggcctgagcttcccgtttggcttgtgaacggcgatgttgctgagctggcggacacaggaaccagagctctggggacctggcagggagagatgtgtggtcagcgtgtgggtttgtggcatttgaggcagtgggactgggtaggagttgcacgtagaccaaaggtgacaggtgaaaggcagggaggtctgggggaaggagaaaaaggtggggggtggggaccagcacagggcactgagcagaggtggcggggagggtgtgggagagaatcggggctgcggatgagctactccccagcctgcccacacaaggctggaaggcaccctaggagggtcagccaggaggccggggcagggtatccattgctgagaactgcccggggagggggtgttcagggctgggagcaacctcatagcaccaccatggtcctgcgtgatcaataatgcccccactccctgatcctgtgtgaccatcaaatgcagggccgcccaagttcaaggagaatctggacgtgggagacagtggccgccaggaggcgccttgagcctgtgccaggaaccagacagtctgggaggtcccaagcggccctagctctcctgtcactcctgctcaggatccctcaaggggtcacactgcagcaggcagggtgacagctagaccctgggagggccagcgggttagtgctgctttctgaatgggcaggagcaggtccatggagaccgcttcctaggtctgtccagggggccttctggaggtctaggggctgtggcttgggggtcagttggtgagacttgagtggctcacactggttacaaaggcctccacactggccctgaccgggactgcggcccactggagttggggagcgggagccagcaggggttcctgacctggagagtgggagacggggggtttaaggtagagggtgagcaggagggaagggtgtggattctggcagtgggcctggaggcggacaggggtccctggccattagggccatgtgtctgccatggtgggggcagggcgagaagttgctgagacagatctgtcaaacccttgccgcttttcagtgagcaagggtgtcaggcttcacccctaacaaccacccacctgtcttttctcccattgccagtctgggaccttacctagaacccctaggggctgaaggaatgtttccccctccagggacagaatttcagggtgtcacatacccaaagctgtggtggtctaggattccacatagaggttctgggcttccagtcctgtgagtcaccagaggtagtagggaacctaaggaaggagagacgagagatagagggagacagactcagggagatgacgtcagaacatctggatccagctgtgcctgaagccctcccttaggcttttccattacacgagcgaagtgcttaagccagtcacaactcggcttcagacacttatgagcagaacttacctgaaacatgccctgatgtcccctcccccatctcagctgctttccccaggcttcgcttctgcccctgtcactggcgggagtccatccaaaccttgagtctggcgttcaagtctggccgcctcacccctcctcttgttggcacatcagccttgggcccctctccctggcccactgggttcctgcccctttgtcctcaagcccctctactccagaaagtcagcctgaattgcacccttctccccaccccacccacgtgaagtagaatcaagagcaataccgggctccccacctaaaagctggggggttggtttcaagtcttctcagtccgattattcccatctgaactccatgaacagggaactacagcttctcctctgacatcctaaacatctttaactattaggggtcatgtgaaccttgtatgcagaaggtgcttaatcaacgcctgctgatgcaggtgatacagggcattggttagtagcatggactctggagccaagctcctggaatcacatcttggctccatcccttaccagctgtgtgtctttgaggaagttaacctctctgagcctcaagagagagaatactagtgtctatcgttaaatgaggtaatacctattactttatttatgctgtaaatgctgacagcagtgcccagcacattgccaagtgctgtgtgatttttactatataaggagctcagaagaaaaggaaagaaaaaggaccacaatcaattccttttctttttttttttttttttttttgagacggagtcttgctctgtcacccaggctggagtgcagtggcgtgatctctgctcactgcaatctccacctcccaggttcaagtgattctcctgcctcagcctctggagtagctgggattacaggcgcccgccaccacgcctggctaatttttctatttttagtagagacagggtttcaccctgttggccaggctggtcccaaactcttggcctcaagtgataggcccgtctcagcctcccaaagtgctgggattacaggtgtgaaccatggcacctggccagtagagtctagatttaactcccagtttatagaatatactagggacagaggagcatgttagatgacaccacagagtgaaaccagtcaaatctagacagtaggaaacccaatcaacctgctttcttcaacaaatgaatgtcatttaaaaagctgagtgattggctgggcacagaggctcacgcctgtaatcccagcactttgagaggccaaggcgggtggatcacgaggtcaggaattcaagaccagcctggccaatgtggtaaaactctgtctgtactaaaaatacaaaaattagccaggtgtggtggcatgtgcctgtagtcccagctatttgggaggctgagggaggctgaggcagaagaattacttgaacccgggcagcagaggttgcagtgagccaagatcatgccactgcactccagcctgggtgacagagcgagactctgtctccaaaaaaacaaccaaccaaaaaactgagtgattacttccacgtcaagacacagatattgaggagggtagaaggcactgccgtgactagactggaatccaggccatctgaagccccaggtgggcagagatgctctggttacctggacatcctgaattccagaattccagcaggtgtctacttagggctgccacctccttgcagttgatttttggagcctcttgttgcctctggcttgaaggcccagctgtctttctaggtgttttcccagtgggcatggagctgcagcgtggctgctgggagcagcactatgtctccctgcccactagctggagctccagctagatgtgaaccaccaggcaggcgcagttgctgctggtgtccagggagcattgaacagcaggagggactgagggtagtaggagagaggagaaagaaggtgggtgtgaaggacaggatgtcatatcagtggtcttccttctgggaggaaacctcacctggctagactcctgtccactcacctacttgcccatcaacccatttatccacccaactgcccacccatctgtccactcatccatccatccatttattcatccatccatccatccatccacttattcatccagccactcataatccactattcatccactcatccattcactaatccactcatccatccatccatttattcattcatccatccatccactcatccatccatccatgggcaaccatcatcaatggctgctaaaaccatttggtttaggccgggcatggtggctcacgcttgtaatcccagcactttgggaggctgaggcgggcagatcacttgaggtcaggagtttgagaccagcctaacatggtgaaaccccatctctactaaaaatacaaaaattagccgggcgtagtagcgggcacctgtaatcccagctactcgggaggctgagacgggagaatcgcttgaacccgggaggcggaagttgcagtgagctgagatcacgccattgcactccagcctgggcaacagagcgagactccgtctcaaaaaaaaaaaaaatcattaggtttagcatccactcatccatccatccatccatccatccatccatccatccacccactcatccatccaattattcatgcactcatccacttgtgcatccgttgatccatccatcaatcatccatccatccatccatcatctatccatccatccatcatccatccatcaatcatccatccatcatccatccatccatccatccatccatccatccatcatccatccatccatccatccatccatccatcatccatccatccacccgccatagacataatgtcaagggaaagaatccagacataaagagtacacagtatgtgattacgtttatatgaagtttgagaacaggccaaactgatctatggtgaaataagtcaggccagtggtgacccttatgagggaattaactgggaggatgtgtgagaaaaacttggggaactggaaatgatccatatcttgatctggggtggttaaatgatattatacatatggaaaatttgctgatctgtacatctgaagatttatgtaaaaaatatatttttaaaagaaaaaagacctcactgagaaggtggcatttgaggaagtcacctgcactgcagaatgctcccagacacctgcagataccgtatacctttgtgtagccagcacacaaataacgggatggctactttgagtaccgtattgaccagaataaattataccagattcccgcctcgcaccgtatgcatttgtattgtggtacaatacaaatttcagtgtgcctatgttcctggcaaactgaagaggcctgacgggaactcagtgggtctttggaaaattctgcacccagtggaagaagagcctataagccctacttaaaaaaaaattttaaatctgaaatatgccttttccctttaaggaggtacaaaggcttatttgagcaggaaattaaacagacaccccctccccaccaacatgcctgaattccaagcacctggtgctggcccagagagagagaggggagttatcgcagggagagtgagataagaatttccttggttggtgctaacaaatgaccgagtttgctttcctgtttcacatacggtttttacatgatttaattgttttaaatgtttgtgaacattcagataagtgccatgtggtttttttgttgttgttgttgagacagaatctcgctctgtcacccgggctggagtgcagtggcgcgatctcgactcactgaaacctccgcctctcaggttcaagcaattcttctgcctcagcctcgccttgtggttttatagatggtttttgtgaaaat[135 bp omitted]aacctccgccttcgggttcaagccattctcgtgcctcagcttccctagtagctgggattacaggcatacaccgccacgcctagctaatttttgtatttttagtagagacagggtttcaccatgttggccaggctggtctcgaactcctgacctcaggtgatccacccaccttagtctcccaaagtgctgggattacaggcctgaaccactgcattcagccaacagtaaacttactaaatattttcctaaagatgcatttatctgacaaggatttgagtgcttgtcacgtgccactcactgtttagtttctgggcacataccaggaaagagaaccaaaaagaaaaactcgaggtgcacattccagtagggagagatggaacagaacatgaaaaaatcatgcttaggctgggcgtggtggctcatgcctgtaattccagcattttgggaggccagggctggtggatcacgtgagcccaggaatttcacgctggcctgggcaacatagtgagactccatctttgtgaaaaaaatacaaaaattagccaggcatggtgatgtgcacctgtagtctcagctacctgggaggctgagttggaaggatcacctgagcccaggaggtcgaggttgcagtgagccatgatcatgcgactgtactccagtctgggcaacagagcaagactctgtctcaaaaaaaaaaaaccaaaatcattattggtaagatacatagaatgtcagaggtgacgagggccatgaggaagagggggcacagaatgttgggggaggggttgcagttttaaataggatgtcaggggaggtcacagtgaaaagtgacattttggccaggcatggtggctcaggcctgtaatcccagcacttggtgggaggctgaggcgggcagatcatctgaggtcaggagttcgagaccagcctggccaacatggtgaaaccccgtctctacttttataaaaattagctgagtgtggtggcaggcacctgtaatcccagatactaaggaggctgaggcaggagaatcgcttgaacccgggaggcggaggttgcagtgagctgagattgtgccactacactccagccttgttgtccagcactccaggcaacaagagcaaaactccatctcaaaaaaaaaaaaaaaagaaagaaaaagaaaagaaaagaaaagtgacatttgagcaaagatatgaaggaagcgaggagagaaactggcaattatctgaaggaaaactgttccaggcagagggcacagtaaatgcaaaaactgtgaggtggatacgtgctacaa[212 bp omitted]gaggcaggagaatcacttgaacccaggaggcggaggttgcagtgagctgagatcgcaccactgcactccagcctgggcgacagagtgagactccatctcaaaacaacaacaacaaaaaacccaaaaacgttatgctaagtcagatacaaaaggtcacctgttgtacgagtccatttatgtgaaatatccaaaacaggcaaatcctttaaggcaaaaagcagattcatggagccagggactcctggggagatgagaagtggaaaggggctgcttgatgaatacggggcaacgtctagggtgaagaagatatcttggagctagacaggagtgatggctgcaaaacagtgtcaatgcacaaaatatccctaatggtacattttagcttacgtgtatcgtttgtatcgtttatttatttatttattttgagatggagtcttgctctgtcacccaggctggagtgcagtggcgtgatctcggctcactgcaacctctgcctcccaggttcaagtgattctcctgcctt[134 bp omitted]cggcctcccaaagtgttgggattacaggtgtgagtcacgccgcgcccagcctaggaatatattttgaaagtagatccaccgtaactggccgaggtacaaggggaataaaaaagagccaaaggtgactccaaggtttctggacttggtctagagttgccattgcctgagatggggaagactgaggaaggaggggctcagaggtggggcaggtgcaggggagaaatgggaactcgtgattgagatgcccattagacgcccgagtatagatgtgaagtaggcagttggaggtaaaaatttggaattcagagaaaattcctgggctggaaatatgcatttggaatttgcttatattcacaacctttaaaacgttgggagtgtgccttgtgtcttcaacctgtgaaaactgcccattctctccctacctaatgtagtagaatttttttgtttgtttgttttttatttttgagacaagagtctcactctgttgcccaggttagagtgcagtgatgcaatcttggctcactgcaacctctgcctcccgggttcaagcgattctcctgcctc[215 bp omitted]cttttgtatagctgtgtggctgaataaaggtgtttgatgtgttgtgtctctgggttgggtttgtctggatgtgcaattgtgtaaatgggtgaaggagatcacttgtgtgttaccatttgtcatgtgtgtgtttgtgtgtgtgaaagagagagaaaaggggagggggatggcctcccagcccagaagtcattactaattcctccagcatcccccacttctgggcaacagaggcccttttgttcacagtggcagaggcagtgatgtcccttctctcttgaggcccctggcaagttctcagccctgagcctggtcaacaaaaggtcctgtgagcttttgcattgagcccggccacttgcagagtgtgctgaggacatcagtgagggcacgggacctgtgacaaccacagtggcttggccagcgatggaggagccaggggcttagagagggccttcttgaggataatgttgttacaagataattatgggaaaaaagggaaaaccatgactgtcctacagatctaaaaatgaacacatggggcggacatgatggctcgtgcctgtaatcagcattctgggaggccgaggtaggagggttgcatgagcccaagagtttgagaccagcctgggcaacatagtgagacctcatatctattcttatttttatttatttttagttttcattttttcttgagatggagtctccctctgtcacccaggctggagtgcagtggcatgatctcagctcactgcaacctctgcctcctgggttcaagcgattctcgagcctcagcctcctgagtagctgggacaacagacatgcaccactaggtccggctaattttttttttttttttttttttttagttttagtagagatggggttttgccatgttaccaggctggtcttgaactcctggcctcgagtgatttgcccgccttggccttctgaagtgctgggattacaggcgtgagccaccacgcctggctccatctctattttttttttttttttttttgagacggagtctcgctctgtcacccaggctagaatgcagtggcgcgatctctgctcactgcaggctccacctcccgggctgacgccgttctccggcctcagcctccggagtaactgggactacaggtgcccgctaccatgcctggctaatttttgtattttcagtagagacgaggattcacc[140 bp omitted]ttggcatattgaagtcttaacccaccgtactttagaatgtgaccttacctggaagtagggtcgttgcagatataatcagttggggtcatactggagtaggatggtccctaaaccatcatgactggtgtccttaaaaaattcggaaatttgagcctggagaggtagctcatgcctgtaatctctgctcttggggaggccgagacaggaacatcacttaagcccaggagtttgagagcagcctggacaacatagcaagaccttgtctctacaaaatattttaaaaaattggctggggccgggcccggttctcaaagcctgtaattccagcactttgggaggccgaggtgagcagatcacttgaggtctggagttggagaccagtgtggccaacatgatgaaagcctgtctctactaaaaatacaaaaattagctgggcatggtggcgcatgcctgtagctccagcttgggaggctgaggcaggagaattgcttgaacctgggaggcagaggttgcagtgagccgagattgtgccactgcactccagcctgggcaacagagtgagactccgtctcaaaaaacaaacaaacaaacaaacaaaaaaatatatatggtatgtatatatttattttgtatatatatttttgtgtatatacatatctatatatataatttgtatttatagagatggggtctcactatgttgcccaggcagaggtttgagtttttgttgagggctctgggagtcacagaagatagctctatttgtgggtcattcactttttgcccagccctgtgttgctttacatgcacttgctcattaaatcctcccaagatcagggggatcagactgaggtgggtggagtcgacttgaactttgcttagggttctaagaggtaaagactaggggatctggggacagggaaatcccagatagagttaacctttttttttttttttttttttttttgatacagtctcgctctgtcgcccaggctggagcgcagtggtgcaatctcagctcactgccttctgtctcctgggttcaagtgattctcctgcctcagcctcccaagtagctgggattacaggcgtgcaccaccacattgggataatttttgtatttttagtagagacagggtttc[132 bp omitted]tcagagctctagttcttcctacctgtataaactcgcttactgctcacatcaaccatctaatggaagtgctgttttcatgttgtttcctgccctttgtctctacctgccagatcactcccatgaaggaagggactttgtttatttattcattgctgtatccctggaaactgggactgcaggtggttatgaagtacctatttgttaaatgagtgaacatttcctgtaggcaattacacccaacttccaaatggagaaacaggctcagagataagcccctgcaccctcactcctcaactcaactgcctgtttctagcactttccatgacgatcccctctgcacggagagggttcatggggagtgactattgttctgtaatgaatgaccaggctgtgccaggtccggcagtaggccttttccttttccttttttttttttttttgagatggagttgagttttgctcttgtcgcccaaacaggagtgcaatggcgtgatcttggctcactgcaacctgtacctcctgggttcaagtgattctcctgcctcagcctcccgaagagctgggactacaggcatgcgccaccacgcctggctaattttcatatttttagtagcgacggggttttgccatgttgtccaggctggtctcgaactcctgacttcaggtgatccacccaccctggcctcccaaagtgctgggatttcaggtgtgacccactgtgcctggccaggccttttcctttctttcttttttcgagacagtgtcttactctgttgtccaggctggggtggcagtggcacaatcacggctcactgcagccccaaactcctgggctaaagtgatccttccacctcagcctccccagtaactgggagtacaggtacatgccaccacacggactaattttaaaagtttttgtagagatggggtcttgctatgttgccccagctggtctcagactcttgggctcaagcagtcctcctgcctcggcctcccaaagcattgggattacaggtatgtgccaccgtgcccagccgcagcaggccttttgtttttttagagagggtcttgcttggtggcctaagctggagtgcagtggtgcaatcacggctcacagcagcttccaaactcctgcgctcaagcgagcctcctgcctaagcctctcaagtagcctgggactgtaggcacacaccaccacgcccggctgatttattatctatttatttatttgaggtggagcctcgctctgtcacccaggctggagtgcattggcctgatcttggctcactgcaacctccgcctcccaggttcaagtaattctcctgcctcagccttccgagtagctgggactacaggcacgcgccaccacgcccatctaatttttgtatttttaatagagacggggttcctccatgttggccaggctggtcttgaactcctgacctcaagtgatccgcccgcctcggccttccaaagtgttgggattacaggcgtgagccaacgcacccagccactaatgtattattattattattctgtagagacgcagtctggctatgttgcccaggctggtcttgaattcctgcctctgcctcccaaagcgctggggttacaggcgtgagccaccgcgccctgcggctgcaggtctttataaggcaactgtgggccctggaccgctccctgaaaacctccccctcaactccctgtctcctccctcacctggtctaccccgaatccttcccctctcgccccctcgccctctccaggggaggtgagggactcaagaatcgcgccctgcttctgtccccaccgcgccgtccccaagcccacgcagtgaaaagaccacccttgaggctgattccgggtccagctgggagcggccagccgtaaatcaccgcccccgtgggccgtaccattctggccggggggacctgggaggggacgcgcggagggcttcccccggggactgcctgtatcgagactctctccagcccaacaggaggatgggaaggagacttgtgtgggggcctcgggctggcgggtcgcgggttccttatcctccgccttggcgcctctccgcccaccgcccaccgcccctccctggcattggttggcgccaggggaagccgaggctccatcctttctgcgcaggttcccgccgcactcgcgcagacctagcgcgtccaggtgggaggttagtgtggcccgggcgtccgctcctcagcggatgtggcagccccgagccatggctctcgccgtccgagtcgtttattggtaagcccagcggccagcggcccccgtccccgacccccgccgggacccgattctcggagccggggtcagggagccccggggagaggacccatgggagcccttgtatgggaaaagggagcccctgtatgtgggtggggtgggcgtacggaggggcgaaaaacagagggcggtcgtccctaggccccgtcttcgacttgtgacacgctgggcatctcgggttataaaaggtggggctgagacgagtgtgtgtcaatttcgaacccccgactccggggctccgctggggaaggggctgggggtcagctttgtaaagggacctaaggctcctccaccctaaggcttcccctcccccaatatcccgaacagtcgcggggtggggacagtgagagcccagaaggttcgagaatgtctcagcctgtgtttcagaagcacttgaattgttggcctctgcccagtgggttcccttggccacgaaccccactccttttctggcctcagttttccgtctgtggcaagagggaggctctgtgtcaataccgaacacgcttaatttctgcaagtctcaggaagggtataataggataggatataaattacgttctctccactccccagcacctaatactgtgtggcatgctgtaggtatttaataaatacgtgttcaatgaatttatcctcccaggaatcccttaagagaggggaattttaggccaggtgccgttgatcacgcctgtaatccaaacactgggaggctgaggcgggtggatcgcttgagcccaagagttcgagaccagcctgggcaacccagggagacccccccctcgtctctacagaaacttaaaaagttagccgggcatggtggcgcactcctgtagtcgcagctgcttgggaggctgaggcaggaggatcactggagcccggaaggcggaagttgcagtgagctgaaatcgtgccactgcactccatcctggacagcagagcgagactctgtctcaaaaaaaaaaagtaaattaaagagaggaattttagttctatgttacaggtgagaaaactgaggctgggactggggtgggggcaggtcagtagcttcaagtctggactgcaggtgacaggggtaactggaacctgggtttgtcggcagctttccaacgtctctgcctgctcgacaaagcagaggcaagagtgacattttgagacgcctaccaggcctgtacaccagattccagtcccgaaatagcctgctgtgggggttgggtgagcctgtatttcaccctggggactgggaaggtgttcagaatctaggagctgcggggccgggtgcggtggctcctgcctgtaatctcagcactttgggaggctggggcgggccgatcccctgaggttaggagttcgagaccagcctggccaacatggtgaaaatacaaaaattagctgggcgtggtgtaagaatccaggagccgcagggttttccttggagtgctgcgagggctgtgggtgagggtggtgggcacagggagtgggtggggaccttacgtgtgctgttcttctcctaatccagttctcctggttttcccccgtccccgtctctcgtatttgtggtctccttgtctcctctctcccctttttcccctcccccttctctgtctcttgcttggtgttggttttctgtgtgtctctgtgtgtccccgcgccaccccctgtgctgtgtcccaaaactctgcctggctggtgcctgtcttctctcttgagggcatctgtcacctcttctgcttggtcatctgtgttcctctttatttcttcctggccccatcttgctctctccccacaccgcctgtgtctaccctcctctccccgatcccccacttctccctctctcccctgggccccaatgtcttggactctcctaccagtggcgcttgaggctacaagtccaaggtaagcagagtggatgcccggggggcattcctgggagctggggaggggtagagtgcatattgggagggggctgactggtatgacccctgctgtgacctctcaccgcgttttcagtatcttcagctcaagaagaagttagaagatgagttccccggccgcctggacatcgtgagtcttgggatggggagaaagacttgagcacagccactgtgtcggtccgttaggcctggatggcactgcaggggggttaggtcagccctacgcccttcacccatgttctcatccccctgggaaggggagggtctccccaagaggacatcttagcccctccaacatctcccctaccccctttcctcagtgcggcgagggaactccccaggccaccgggttctttgaagtgatggtagccgggaagttgattcactctaagaaggtatgtctgtctgtccgtcctgcctggttttggggctagcatggggttggggctgaggttggtgtctcggtcccagctcaccccttccctcttcctcccctccctagaaaggcgatggctacgtggacacagaaagcaagtttctgaagttggtggccgccatcaaagccgccttggctcagggctaatgcgccctgaaggcagaggtgagggggcccactagacagggacaccaccctttggatcttctccctgccccatgctctgactccttggcccagggtggagagcctgggagatgggggggacatcacgtgtgtccccagagcgagcgggataaagttagacccggttggtggaggacaacaactgagatggggtcagaggtgtgcagggtgacagctgagatggtgatgggtcagagatatgcaggatgacagctgagatggggtcaaaggtatgcaggatgacagctgagatggtgatgggtcagaggtgtgcaggatgacagctgagatggtgatgggtcaaaggtatgcaggatgacggctgagatggtgatgggtcagaggtgtgcaggatgacggctgagatgctgatgagtcagaggtgtgcaggatgatggctgagatggtgatgggtcagaggtgtgcaggatgacggctgagatggtgatgggtcagagatgtgcaggatgacagctgagatggggtcagaggtgtgcaggatgacagctgagatagggtcagaggtatgcaggatgacagctgagatggggtatgcaagatgacagctgagttggtggtggggtcagagggctgccctaaaacagctctcctggtttgggaatgaaaagtgctagcaacccaacggttcagaatccggaactctaggtctttgtcccattgccaagaaacagttcccaacccagcaggtcatgtgacagcgtccggccaagttcccagcatgttttgagacagaatttccttgctccacaatttcgagtaggtcactaattatcaccgggctctgaacctgagaattagttctaggaatattccagacctgatccagctccagaaacttacccactttggaactgaacatgagtccaagaatgctctagaaacaaatgctaactctagaatggattgtctgctccaaaaaaaccctagagctgactcccagttctccccatagagccgagaatgaaatacaccaccagctcccaacacactgtaaacctgagccccccttcccaacccagcaattgaaaaatgtgaaccagctcctaagcactagaattgaccactagttcctggagttggctactggttccttatcactgtttttctttctttctttcttttttttttgagatggagtcttgctctgtctcccgggctggagtgcagtggcgcgatctcggctcactgcagcctctgcctcccgagttcaagcaattctcctgtgtcagcctcccaagtagctgggattacaggcacatgccactatgcccggctaatttttgtatttttagtaggtctgatcctgttggccaggctggtcttcaggtgatccacctgccttggccttccaaagtgttgggattacaggcgtgagccaccgtgcttggcctccttaagcactctgaaccaagtattgtttccagcctaatacattgtggaacaagtggcaatttctatatgaacctcaggaacaaagaactactttccagcaccttctgagtctgattttccagtttgtaagccagtatggtccagataagcgtgaaacccaacccattctagaacagttactagccctttttctggtctctggcactgcagggcctggagcatagtttattttttgaggtggagtctcgctctgtcgcccaggctggagtacagtagtgtgatctcggctcactgcaacatctgcctcctgggttcaagggattcttgtgtctcagcctcgtgagtagctggaattacagatgtctgccaccatgctgggcaaatttttttttttttttctaagacggagtctctgtcgcccaggctggagtgcagtggcgtgatctcggctcactgcaagctccgcctcccgggttcacgccattctcctgcctcagcctcccaagtagctgggactacaagcgcctgccaccacgcctggctaattttttgtattttttagtagagacggggtttcaccgtgttagccaggctggttttgaactcttgacctcaggtgatccgcctgcttcggcctcccgaagtgctgggattataggcgtgagccactgcgcctggccatactttttactcccctctaaccttcagcaccagttcccattccatgttgatctagaacagagtatcccatcccaacacactgtggacccaagtaccagctcccagtgtgccttgtgccagaaaactagttttcaaatgcgttaaactcaagttccatttcctaaaattctttaccagagcagaatgaggtcatgttcaatgtgaattgggacgtgccaatttgaagtaatgcagaaacgatatcttgccttatgtgcaggtctgaaacaaagcaaatccctctaacataaaggaaaagaaaaatggaattgcctaattccaaagctgcatcagctgaatgcattgtgga[133 bp omitted]tcccaggctcaagcgattctcctgccacagcctcccaagtagctgggactacagttgtgcaccatcacgcccagctaatttttctagtttttgtagagatgggtttttttcaccatgttgcccagactggtctcaaactcttgggctcaagtgatccgcccgcctcagcctcacaaagtgctgggattacagacgtgagccaccacacccggctatctttcttccttttaacatgggccccacgcctggcctctgttcctgcaaactgactccctaccccaaccacctctttttctctccacagtccagggaccttgacccagcccctctcagcagacgcttcatgataggaaggactgaaaagtcttgtggacacctggtctttccctgatgttctcgtggctgctgttgggggcagagattgacgcccccggtctttgcctctgagcgggagagtctgtgtgtatgtgtcttccccggaatccacaccaccccaccctcctcctgtcccgtggtttcatcatatctctttgcataccccatgtcttccccagttgtcccctggagtttggggggacatcccgcctcaggcatccttctcaaggggaagccaagagaggcatcaggatgggtgggtttctgattgtggcaacgtttgcaaccgttcacgattcaataaatattggatgaatttaactgaatgtgcctgtgaggagtgtatcttgttttacccctgtgcctcctccctccaggaccccgtcccagaaattagcaaccacgtgttgagtgctcagtgcaccaaccctctgtagggaagcaccttactgcaatgctgaggttgttattttttaagacagtcttgctctggagtgcagtggtgcgatcccagcttactgcagtgtccctctcctgggttcaagtgattctcccgtctcagcttcccgagtagctaggaccacaagtgtgaactgctatgcctggctaatctttttctttttctttttctttcttttttttttttttttttgagacggagtcttgttctgtcgcccaggctggagtgcagtggtgcgatcttggctcactgcaacctccgcctcccggttccagcgattctcctgcctcagcctcccatgtaactggaattacagatgcccgccaccacacccagctaattttttgtatttttagtagcgatggggtttcaccatgttggccagactggtctcaaactcctgaccttgtgaccctcccgcctcggcctcccaaagtgctgggactacaggtatgagccaccgcgccggacgtaatttttggattttgtaatagagacagggtttcaccatgttggccaggctcgtcttgaactcctgacctcaggggatcctcccgccttggcctcccaaagtgctgggattataggcgtgagccaccatgcccggctgtttttgtaactattgatagccatgaagtgcatggacactttcctcaaatcaggtacaattctaaactgtttcactctcaaaccttgacccactcattctgggaggacagaaataaaattgttcctcccccaagtcaaatgctgcgactcctgaaacccaccacattccatggatctctgctcagtgacatctgggaaacacaagacagccatcaacaatagcaacaagaggccgggtgcagtggctcacgcttgtaatccggcactttgggaggccaaggtgagcagattgcttgaggccaagagttcaagaccagcctgggcaacatggtgaaaccccacctctactaaaattagcccaagtgtggtggcaggtgcctgtaatcccagctactcgccacctgccactaggttgagaaccgcttcaacctgggaagcagaggttgcagtgagctgagatcgtgccactgcactccagcctgggcgacacactgagacactgtctcaaaaaacaaaaaaaccccaaaccaaatgaacaatagcaacaagaaacaagcccccacatggcttcatttctaatgattctgaggattttcttagtatgacagtcctttggtggtatagttctttattttttttctaagacaggttctctgtcacccaggctagaatgctgtggtaggatcatggctcactgcagcctcgacctcctgggctcaagtgatcctcctgcttcagcctcctgtgtatctggaatcacaggcacatgccatcatgcctggctcttttttttttttttttttagagatggggtcttgctattttgcccaggtggtctcaaactcctggcctcaagtgatcctcctcctttggcctcccaaaatgctgggattacaggcgtgagccacggagcctggcctggtggtgtagttcttttttttttttttttttgagatggagtctcgctgtgtcgctgaggctggagtgtagtggcgcgatcttagctcactgcaacctccacctccctggttcaagcaattcccctgcctcagctcctgagtagctgggattacaggcatatgtcaccacgcctggctaattttgtgtgtgtgtgtgtgtgtgtgtgtgttttgtttttcttttttcaagtagagatggggtttcaccatgttggccagactggtctcaaactcctgacctcaggcgatccccccgcctcggcctcctaaagtgttggaattacaggcgtgagccaccgcaccgggccctggtggtgtagttctaagctaggtagagagagatcacagagagtggcatctgaacatctgagactcaatggaggttgaccgtaatcccatttgccaactggtctcacatttggggtcagcccagtatcaacatcctcagctgtcagcactccacctgttagccaaggcacactgtggcacccattcatcatttaaatgacacaagacttttcagttctttgtttaagcaagaattctggcagggctgggctaggttggcttatgcttcagtgggaacctaaatctaaacgaacctaaagcagaacgaacctaaatctccatggatgaacacagcacatgcaaagccctctccagagcaacagttctcctgcttctagtcaggaatctagcgcaatgttgtccaatagaactttctgcacgatggaatttttctctttttttgtttttttgagatggagtttcactcttgttgcccaggctggagtgcaatggtgggaccttggctcactgcaacctctacctcctgggttcaagcaattgttctgcctcagtctcccaagtagctgagattacaggcgcctgcctgtagctaccatgcctggctaattttttttttaatgtatttttagtagagatggggttttaccacgttggccaggttggtctcaaacgcctaacctcaggtggtccacccacctcggcctcccaaagtggtgggattacaggcgtgagccaccgtgccggctagcatgatggaatttttccatatctgccctgcccaacaccatagcaactgacttcatgttactggtgacaacttgaaatgtgacacgaccaaggaactgaatgattatatttggccgggcgcagtggctcacgcctggaatcccagcactttgggaggctaagctgggaggatcacttgagccctggagtttgagaccagcctgggcaacatagtgagaacctgtctctacaaaaaatacaaaaaacagctgggcatggtggtgcatgcctgtaatctcagcttcttgggaggctgaggtgggaggattgcttgagcccgggaggtcgaggctgcagtgatctgtgatggcaccactgcactccagcctgggcgacagagtgagtgcctgtctcaaaaaaaaaaaaaaaaagaaaaataacattcaacccatgtaatatgtggctagttgttatcggactgtgcaattctgttattctgttgctgcacctggccccaaagcagctttagtagacagagcggagacagcgtaggcaatcttgcattggcttttcttttctcttttctttcatttttttttttgagacagagtcttgctctgttgcccaggctggagtccagtggcatgatcttggttctctgcaacctccacctccggggttcaagcgattctcttgcctcagcctcctgaccaggtgggactacaggcgcacgtcaccacgcccagctaatttttgtatttttagtagagacgaggtttcaccgtgttggccaggctggtctcaaagtcttgacctggtgatccaccctccttggcctcccaaagtgctggattacagatgtgagccactgttcccggcctgcttttcttttttttaaagagacgaaggtatcgctgtgtcgcccaggctggagtgttagtggcatgatcacggttcactgcagcctggaagtcctgggctcaagcgatcttgccacctcagcctccgtagtagctgggactacaagcgcaccaccacttccagctaatttattttttttcattttgttggggaactgggcgaggatggggcagggtgggaggccttgctatgttgctcaggctggtctcgaacctggcctcaagcgatctttcccgcttcggccttcagagcaggcattggctgctaaaagcatcagccaggaagtgatgcgtatcagctttcgtcacagcccattggccagaaccagttacgcagccccgcccactttgagaacccctaccacgaaacccctgcctacctgcagaacttggctggggaacttagtcttcctgtgtttaggaaagggatgagaacttgaaaacttggtgagcactacaaatatctaccagggctcttattttaatcgtaccgtatgcatgaaaacgccagcatcggattttggcgtaatcaagacaattcacaccttcaaagaattcagcctgaccatcacccagcctgaaaaggggagacaccgtgaattcctttctaacagcgacagcatgtggccgcgtctgagaactgcatcttctcagttcacctcggatcaccgcggaagaccaggaatcactgtggaatccctgtgggtcaccaggaatcacttccggtcatctagattttagggtagtcaagtgaatcaccatctttgaattggtgacatgacactttctttttaaaacttaaaaattaaaatttagccgtgcgcggtggcttacgcctgtaatcccagcgctttgggaggccgaagagggcggatcacgaggtcaagagatctagaccagtctggccaacatggtgaaaccccgtctctactaaaaatgcaaaaatgagccgggcgtcgtagctcccagctactcgggaggctgaggcaggagaatcgcttgaagtcgggaggcggaggttgtagtgagctgagatcgcgccactgcactccagcctgggtgagagtgaaaaaaaaaaaaaaaattaaaatttttctaggtacatagtaggtgtatatatttatgggggacatgggctattttgatacaggcatccaatgcatactaataacatcagggtaaatgagttatctatcccctcaagcatttaacttttgtgttacaaataatccaattaaactctttttttttcttttttctttttttgagacggagtcttgctctgtcccccatgctggagtgcagtggcaagatctcggctcaccgcaacctccgcctcctgggttcaagcgattctcctgcctcagcctcccgagtagctgggattacaggcatgcgccaccacgcccggctaatttttgtatttttagtagagatggggtttcaccatgttggccaggatggtctcgatctcttgatcttgtttatccgcccgcttcggcctcccaaagtgctgggattacacgcgttaaccaccgcacttggcctttttctgtatttttagtagaggcggggtttcaccatgttggccaggctggcctcaaattcctcacctcaggtgatccacccacctcggcctcccagagtgctgggattacaggtgtgagtcactgtgcccggccacacaggcgtgagccacactgcgcctggccaggagattctttttaatttagcagttttcagaatattaaattggagcctcaacaactttctctagttttttttttctctcttttttgaggaccattgtgaaccaatggactttcatgcatctgacgtctttcaattcattgcagctcttctttgtaagctcaagttgttcagcctttggtttcttttcttttcttttaaaaaatattattatagaaacggggtcttgctatgttgcctggctggtctcgaattcctgggctccggcgatttgcccgcttcgacctcccaaagcaggaggggcttttgttttatccaagctctctgtccccgccccctcccccagtagcctgtcgggtgtctcctgcctccaaatcggatctaattctctctctgctctgctgagactggccctggcttaagaggactggaacacttgctacatgggaccaggacagggtcagagaaccagcgccggggagacccaagggccaggattgccaccagggggcagcagagaggcagagtagcagaaggaagaggtgggggtgcttccatctgacggcgggcagtgggagggcggggtggtggatgaggaggggatggtatagagggaacagtcctcccacccccaccagagtgggttaacagtacttacatggtcactggatgcgtattgaagaatgagcccgggctcagtgattcacgcctgtaatctcaacactgggaggttgaaatgggagggtctctggaggtcaggagttcgagaccagcctgggcaatgtgaaaaaaccccgttcctaccaaaaatacaaaagattagccaggcgtggtggcacgcgcctgtggtcccagccactcgggaggctgaggtgggaggatcccttgagcccaggaggtggaggttacagtgagctgagatcacacccattgcactccagcctgggcgacagagtgagaccctgactcaaaaaacaaacaaacag[138 bp omitted]atggtgaaaccccgactctactaaaaacacaaaaatggcatggtggtacgtgcctgtattcccagctacttgggaggctgaggcaggagaattgcttgaaactgggaggcagaggttgcactgagctgagatcgcatcactgcactctagcccctgggtgacagagagacttcatcccaaaaaaaaaaaaaaaaagagagagactgacagaaaaagaccaagaacattctgtatgtgatgctattattagctataataatggcagatatggtttgttgatcactgaccataatcagtgttaagatttacatgatttgactcatctaacccttctccaaaccctccctttcaccaaaaaatctttcatattaaaaattcacagttttttttttttttgagatggagtctcactctgtcacctaggctggagtgcagtggcatgatttcggctcactgcaacttctgcctcctgggttcgagagattctcctgcctcagcaccccaagtagctgagactacaggcacgcaccaccacactcagctaattttttattttatatttatttatttttattttattttatttttttgagatggagttccgctcttgctgcccaggttggagtgcaatggcgcgatttctgctcactgcaacctctgcctcccaggttcaagcaattctcctgcctcagcttcccgagtagctggggttacaggcatgtgtcactacgcccagctgattttgtatttttagtagagacggggt[135 bp omitted]ttaaagatagatgctttctttacattagataaaacacacttgtcttaagtgttcagtataattgctttgataaatgtatgcaactgtctgggtgcggtggctcatgcctgtaatcccaacactttgggaggctgaggcaagagtatcacttgaacccgagagttcaagagcatcctgggcaacatagcaagaccctgtctctacaaaaaataaaaaaaaattggctgggcatggtggtgtgcacctgtagtcttagctacttgggaggctgaggtggaaggatcacttgagcctgagagcttaaggctgcggtaagccatgtttgtgccactgcactccagcctgggtgacacagtgagacccgtctcaaaaaaggatcaacaacaacaaagtatacaactatgataccagcacccaaacaagaagcatccatcagcccccaaatttccctgggacctttttgcagtcattttatattcattctcacacctgcctgggcaaccaccaatctgctttctctaactatagattacttctgtctcttctagaatttcatataaatgaaatagtatcatatagagctttctgtaactacagattatttccatatcttctagaatttcatagaaatgaaattgcatcacatacaacctcttgtgtctggcttttttcacccaacataaatgattttgagattcttccatatcacatgtgtatccacagcttgttccttttcagtgctgtgttatagtccattgtatggacataccataatttgcttaaccattcacttgggctgtttctattttggtcttttatgaataaagttgttatgaatattcttgtacaagtcttcctgtggacatatgtttatttcttatttattatttttctcgagacagggtcttgctttgtcactgaggctggacacaaggcttgctgtgtccttgtcctgggctctagtgatcctcccatctcagcctcctaagtagctggaattacaagtgtgtaccatcatgctcagttaattttaatatttttatagagatggggtctcattatattgcccagactggtctcaagcagtcctcctgcctcagcctcccaaagttttttttttgagacggagtcttgctctgtcaccaggctggagtgcagtggcatgatcttggctcactgcaacctccacctcctgggttcaagcaattctcctgcctcagcctcccaagtagctgggactacaggcatgcaccactacacccagctaatttttgtatttttagtagagatgaggtttcaccatgttggctaggatggtctcgatctcttgaccttgtgatccactcgcctcggcctcccaaagtgctgggatttcaggcgtgagccactgcatgtggtccattttagttttaatatgcatttccctgatgatttttgatgtcatgggcttactggcctttttgcatatctttttttttttttttttttttttttgagacgggaggctggctctgtcacccaggctggagtcagtggcacgatcttggttcactgcaacctccacctcctgggttcaaccaattctccagcctcagcctctggagtagccaccacacctaatttttgtatttttagtagagacaaggtttc[133 bp omitted]tgccatgttgcccaggtggtcttgaactcctgggctccagccatcctcctgccaaagcctctcaaagcgctggaattacaggcatgagccactgtgcacagcctggtctaagaaatccttgctcactccaagactgtaaaaatattctcctatggatgcttctagaagcttcctggttgtagcttttcatttggagtgaggtgggagtcaaggttttttttgtttttgtttttgttttttttttttttttttgagacagagttttgctcttgttgcccaggctggagtgtaatggcgtgattttggctcattgcaacctccacctcccgggttcaagtgattctcctgcctcagcctctcgggtagctgggattacagtcatgcaccaccacgcccggctaattttttagtagagatggggtttctccatgttggtcaggctggtctcgaactcctgacctcaggtgatctgcccgcctcaacctcccaaagtactgggattacaggggtgagccaccgtgcccagcccagtttatttttatttatttacttttttatggtgaaaagatatacatatattgagaattagccagctggactcagtttagatgatcccaattttgttggcaacatccaaagcattgtaaccaggagtcggttgaacatgtgacttcttctctccgtcaggccgaatcagagcttcttcacagcctgtttgatctggtgctccttggctttaacatctataatgaaggcaagtgtgttgttgtcgtctgtcttcttcatggcggactcagtggtcggcggaaacgtgatgatcgcagagtggccaagcttgtttctccagggggcgctcttctgaggatatttgggctccctccggagtcgcgctgtcttgggccgcctgaaggtgggtgacctgcggatcttctcttctgtgtggctgtggacggctttcaacactgctttcttggcctttaaagccttcggtttggcttgggctttaggagaggcaggagcttccttcgctttcggcagcatcttgtgaaaagacaaggttaattttt[137 bp omitted]cggtgaaaccctgtctctactaaaaatacaaaaaattagccgggtgtggtggcgggcacctgtagtcccagctactcgggaggctgaggcaggagaatggcgtgaacccgggaggcagaggttgcagtgagccgagatcgcgccactgtactccagcctgggcgacagagctagactctgtctcaaaaataaaaaaaaaaaataaaaaaaaataaagagggagtctctctctgtcgccaggctggagtgcagtgtcctgatctcggctcactgcaacctccgcctcccaggttcaagcaattctcctgcctc[135 bp omitted]acctcccaaactgctgggattacaggtgtgagccaccgcgcccggcccaggaccatttgttaaactccccatcctctcatcaaattgacttgatactttgttcaaaacaagttgattgcatatgtggatctatttctggattttctcttttattctactgatctctttgttgatctttatgctcataacacactttcttgactactgtagctttataataaatcttgaaattaggtagtatacgttctccagttttgttctttttcaagattatttggctattctaaatctgcatttctgtctaattttaggatcatcttatcagttttatcagaaaacttgactgagattttgattgggattgcaatgaatttataggcagatttggggagactatccatgaacatcagatgcctttctgtttatttaggtctttttttttttttctttttttttttga[131 bp omitted]caccaggcccggctgatttttttgtattttttttaagtaaagacggggtt[142 bp omitted]ataattgtggtcgtagctgtcctgcacatcctactttcttcctaggcattttataggtgtgtgtgcatgcgtgcgtgtgtgtgtgtgtgtattttgagacagggtcttgctctgttgcccaggctggagtgcagtggtgcagtgatgctgcctcaaactcctgggctcaagcaattctcctacctcagtctcccaagtagctgggactacagctgtgcactaccatgcccagctagtgttatttttaattttttttgtgtagatggagtcttgctttattttacagactggtgttgaattcctggcctcaaagtagctgggacgacagctgtgcaccaccatgcccagctagttttattttttatttttttgtgtagatggggttttgctatgttgtacaggctggtcttgaattcctggcctcaagcgatcctcctgcctcgatctcccaaagtgctgggattacaggaatgagccgccacactcagcctattttatgttttttaatgcttttgtaaatagtgtttttaaaaaacttattttccaattttttgttgctattatatagaaatataatttgtttctttttttaaaaaaaaattcccacacaacaccaagatatacaattggtttttgtttattgattttgtatcctggaaccttgccaaattcatgaattaatcccaggagtttgagtgtgtgtgtgtgtgtgtgtgtgtgtgtgtgtgtctgtgtgtgtgtttattctgtagatattttcttatgttagctacaagagttaccactttatccaagatacagttctgtaatgataaaataaaagcacttctctagcaagaaattctgagtgtacaaaagtgaataggccgggcgtggtggctcacatctgtaatcccagcacttcgggaggccaaggcaggtgaatcacttgaggtcaggagtttgagaccagcgtggccagcatgtgaaaccctgtctctactaaaaatacaaaattagccaggtgtggtggagggtgcctgtaatcccagctacttgggaggctgaggcacgagaattgcttgaacccaggaggtggaggttgcagtgagccgagatagcaccattgcactccagcctgcgtgacacagcaagaccgtctcaaaaaaagaaaaaaaaaaaaagtgaatgaatacagaactaaaaataaatttccattccatccccattcccagagctgactgcagccaaaagacagaagaaaaaagtggaagggtttactttttttttttttttttttgagatggagtctcgccctgtcacccaggctggagtgcagtggcacgatctcggctcactgcagcctctgcctccggagttcaagcgattctcctgcctcagcctcctgagtagctgggattacaggtgcccgacaccacgtccggctaatttttgtatctttagtagagatgaggtttcatcgtgttagccaggctggtctcgaactcctgacctcgtgatcggcccgcctcagcctcccaaagtgctgggattacaggcatgagccactgcgtccggccagtttacatttttcatcacatatgcagagaaaatcaggtgtgtctgcggaacatctacaacacgttccactcactgccccaatcagggagagcagattctgcagctttgttttgtcttcctgaggagtctctctggggcttatataggggaagggctccaggagaccctgacagcacctactgctgtaactgaagtctcacggccagtaaggaggcatgagaaggtgccagcacgggcttgagaagggttttgacatcatccaccaatatgtcccatctccccttcaactcttctgtgacccggctgagattctgcagatgccgcctcaccgggctctaagaggattggggcaggtggtgagttagattaggtcaaggccagggaaacctgcaagggagaaacgcagggactgagagggagggagagagactagggaaggagagggaaggggagcatgggtctgcacagggcagagagaggtaggagatgagtcggaggtgggaagagatatgggaggagggtgttgtctaaatggcagaataataagatcccccgtttcctccgagcttcctgtaagctaggctctgtgctgggcatgtcaatgacacagctccatgttgctcacaccccacacgtatggagaaggtgtagttgatacccaaagtctcatggacatccagctgtccacaggtcctcctccaaacactccaagaagcagatgagcttggtatcacttgatagagtggaggagttaagggctgtgctctttggctgggtggcctggtacatgctcagactgaatctttttggtcttctcagaaagggacttaaacaccctgatgtttggcgtaaccccccgtaggcaaagggattacaggctgccaacctcaaaggaccttttgtaaggatattagagcacataggacagctgctgtcacgtgggaagtgacacgggctggggagaccctacctgttctggttttgagggcaggaaactcccatgcctcagtttccccttttctttgcacctcactttccctctctccctccccctcagtctctcccttttcccatcgctctgcctcccttgggacagtctcagtgtggttttctgtgtacatccctctcagggtctctctgaggagcaggagcatttttcattatatcccggcagtctgtccccacctccaaccacagcctgtcacatgtttcccccaaatccgcgctaattctccctatgttttgctgaggctggcctgacttaagaggattgaagcatttgctaaatgagactgggacagggtcagagaactagctgtgggaagacacaggggccaggatggccacaaggtgatggcagaagaagcaggagaggagaggacagaggcaaagggtggcatgctattggtgcaaggatatagagaccaagaacccaatagagactttccgtagagccagtcattgtggctcacacccgtaatcccagcaatttgggaggccaaggtgggaggatcacttgaaccaggaattcaagaccagcctgggcaacatggtgagaccttgtttctgcaaaaagtaaaaggaaattagccaggcatggtggtgtgtgcctgtggtcccagctactcagaaggctgaggtgggaggatcagttgagcctgggaggttgaggttgtag[132 bp omitted]ggctagcggatcaatgaggccaggagttcaagaccaacgtagccaacatggctaaaccctgtctctactaaaaatacaaaaaattagctgggcatggtggtgcacgcctgtaaaaccagctactcaggatgctgaggcatgagaatcacttgaacctgggaggcagtggttgcagtgagctgagatgatgccattgcactccagcctgggcaacagagtgaaactgtctccaaaaaaaaaaacaaaaaataaaatacaaaaaagtttgtagatacagactcatacattaatgaacccttgatttatgacaaaatacaaaataaattgcaagcttctcaataaattgacaattagaaatccatgagaaaagaaaaatccttacctcacaccataaacagtcaattatacatgtattaaagacctaaatatgaaaggtaaaactataaaaatttagagaaaaaaatggaataccttcatcatcatgtgataatgcaagatttctttttttcctgctgtttacctgatcttggggaaagttttttttttttttttttggagatggagtctcactctgtcacccaggctggagtgcagtggcacgatctcggctcaccgcaacctccgcctcctgggttcaagcgattcttctgcctcagcctcctgagtagctgggattacaggcatgtgccatcacacccggctaatttttgtacttttagtagaggtggggtttca[141 bp omitted]aaagcattactcttagaaggcaaaagtgagaaaatgtagcaattttcgaagcagtaagctggacacctcagactggtgccacctgtgggctttgtctccaattagtaacaattagtaacagaggacttttagaaacaccagcttttagaagtttttctgtcaatttgaaaatacagatatattgagatattttgtaaaagtcattttattttatttgattattttatattttttagacaaggtctcagtctgtactccaggctggagtacagtgatacgatctcagctcactgcaacatccacctcctaggttcaagtgattctcctgctttagcctcccaagtagctgggactacaggcacctgccagcatgcccggctaatttttgtattattattatttttttagtgaagatggggtttcaccatgttggccaggctggtctcaaactcttaacttcaagtgatccacctgttttggcctcccaaagtgttgggattacaggcatgagccaccgtgcctggcccattttaatttttattaataacttcattgtgttttacaacattatcagtctgccactgatggaaatgaaaaataaaacaagacaaaactggtccaaaacaataggtaatttgaaaagcagtgaaatagacaacattaaaatcaagaaatactaatgaaacaaaatgcaaataggaaaggtgtctgcagaactttaattgccaagagaatataagaatacattcaaataaatgaaggaaaaggggtaaacaaatacacattatgaagatatctaaggttcaattaacatgtgagggtttaacttctcaatcatcagggaaatggatattacaaccacaacaaaaccacaagtcattggatcgacaaacattaaaaagtctcacaatcctaagtgttggggaagatgctgaccatcagaagccctgggaaaagccctttagaaagctctcgagcagcatccactaatgccagatatcccagtgagcagcgactccaatcccagcagagaaacgctcaggctcaattcaaatgacaggcaggcacattcacagcagagccacctgtgatagctgcacagtgaagacagcaaatgtccacctgcagcagggtgggtaaagggtgatgcattcactgcagaaagtcaccagcagtgtagatcagccactccaggccctctgggatctgaagaactttgcaggcacaggccccctataaatccagtaataacctggggcctgagtgattttcattcacagagccaccctcctcttggggctgagaccctgagtgttttttgcccatagagtcatccccttcttggtactgagaggtcatggtggagactgaggatccctccaaggggtctaggggtaggagcagctctgtgaagtgagggaataactgggtgtctggcaagaagtcggaggcatcggggctctgaggccataagggggctggggctgggagtgatcctgggcctgggattggagctgggactgagcctgagcctgggcctgagcctgggcctaaaatcggggctaggcctggaagtgagccagggcttcgcatccggccaggacttaagatgggacctgggccttggagtctgcctgggcctgggatctgggctgggctgggaatcgggcctataattgggcctgggcctgagattgggcctgggattgggcctgggatcaggcctgggttcgggcctgagattgggcctgggatcgggcctgggttcgggcctgagattgggcctgggattgggcctgggatcgggcctgggtttgggcctgagattgggcctgagattgggcctgggatcgggcctgggatcgggactgagattgggcctgggatcgggcctgagattgggcctgggatcgggcctgggtttgggcctgggatcgggcctgggtttgggcctgagaatgggcctgagattgggcctgggatcggggctgggcctgaaattgggcctgggattgggccacggaatgggcctgggatctggactgggcctgaaattgggcctgggattggggctgggatcgggcttgggatctgagctgggcctggaattgggcctggaattgagccagggagtgggcctgggatctgggctgggcctgggattggggcagggatcgggccagggcctggactcagggcagctgggatgcccttctgggctctgcacccagggccaccccaggcctggtggaggctgcagatcgtgggttccgccgctggaaggattcccgaggggccccgctgaggtgcggaggcagaggctgcagggactaggggcgcagcgcgggctcctcggcctctctgcccagggacgcgctggggctgctgctggagccgccgctcccgagctagtttggcgcggcgattcttgaaccacacctggggggcagaggggacagggagaaggtgtgaaggaggggctcgcgcggcccagtgagccttttggggtcggggccagcctgaagcctctccctgtgctcaacagccccccatcccccaccccaccaaaagagggccccggctccaaggcctggagaatggagggaagagggagggaaaagtagggggaggagggtggggtgggatgggaggagcggggtctgccgcccaggtgcccggggggccagggagggttcgaggggagggaccgcgggttctcacgggtgcctgaggtccgggcaccgggagaccccgtgggggacagcctgggccgatcatgtgggcgagtttgggctagcatagagttggaacaggactcaggatgcagccctggtctacactggcgggaccccttgcgtggcagggcgggaggtggtcgggcgggccaggccccggtgagtgacagcggtggggaggctccttggggtgactggggcgggcagggtgggggtgggggtcagacctgcagctgttgctccctgaggctgagcatctccgccagattcagtcgctggtcgtagttcgggtactggtccttctgaaagtaaaattctagcactttctgctggctttcagtgtagaccgtgcgctcctgccgctgtctccttggagggtccagggccaggggagggcctgggggtgggagggaaacaggtcacagaaacccccaggcagcccccagcccccctagggaccccgtcccctgcaccaggccaggagcccaggcagtgtgggctggggcggcaccgcggatagcagcctggtatccagaccagaccttgcacctctctgggcctcagggtccacatctaggaaataggcgcgataacagctcctgggaaggcaggcagcgtaggcgcctcacctcggagcagacggggctgcctcaggcctgctcaaccctccccagctgccccgtcccctcccatccaagggttatagggaccctgacacttgcaggggagccgccacctgcccagtcctctgctccactcaactgcatggtttaatttctttccttctttctttttcttggaggggatctcgctctgtcacccaggctggagtgcagtgatgtgatcacggctcaagtcagcctccacttcctgggctcaaggaaccccccgccttagtctcccgagtagctgggaccacaggtgtgcaccacgacccctgggtaatttttgtatttttgctaaagacgggtctccactatgttggctcggctggtttcagagtcccgggctcaagtgatcctcccaccttggcttcccaaagagctgggatcacaggcgtgagacgctacacccagctgcatgatttttcatttcccagacaccactaagttctcccccgtctgcaggacaggaagccgcccgcacaggcccagcccttctctggctgcccagatttgcactctgcagcctcagccacaggatcagcccagacccctcacacctctgtccccgctcaccttggagatgaccagggtcttgcatcctgagtcctgatctgttcccaaacacaagtgtgtactgacaagggcttggctcttaaatcacttctctgctgtgcccaccctggcccaccctgccgggaccctccctttcccaccctgccctgcagtcccgccccctggaggagttgaatgatggattaatccttcatcactgatcaggtactgcctgctgagctgtgctaggagctggagaacctcagtggacaacacagccttggtttcaccctcatgggccctagcccaggtgaggtggcattccatgcgggtttggttgggggagtcaacatcgtgacctgtggttggggtccccatctcaggagaggcaccgccagccagcccccaggagtcatccttgttccttcccagggctggggccccgagtgaccaatgccggtgagtctacccactcctcctggctcctgggctgcctgccttgtccagccactatccctccttcctggatgaccttgcaacctcctctttggtacctcaaggccactctggcccctactatccattccaaaaattgctccctaggtgcctataggtgtaagcagagcttagtacacattggccctgctgataatggtttggtttctgtagtggatttgcctatggggtgaagttctgataggcattcacatagacctctgttggtttctcctggagagtaaatgacctcagtgctggtttattccagtttatatacggggctcgtgtgctgggttcacatgagcccagcctctccaagctgcatagacctgtatcaggagggggcacaggtctgatggacgtgcccatggaccgctgctggtctgcccttgtgagtgaatgaacctactgctgatgatacaggggacccatgaccttggtctacagagatcggatccctcagagatgcgtcttctctgtcagacacctggctgtcctcatttccccatggcaggacccacgtgggttcagggattagagagattgacaaggctcatggtgcagggaactagaaatgactcatgcaatcaatttcaaaattcaataaaacgtagacattgttaccacgggcctcgctcattgttttcacctgctacttagagttctgctgtagaaagcagcatccccagcaatgattcctcatcgcacacattgtccggcttcatctacaggacatgctgggaacacagtagtgaccacagagattttgcaccatggctatttatttggtcaataaagacataaacagatgaacaagctcactggtactattttgtgaaaatagacatttaaatataagcaagttcacggcagcatgattcactatcgcccaaaaggagaaaatgctga[139 bp omitted]catggcgaaaccctgtctactaaaaatacaaaaattagctgggcgtggtggccagcacctgaatttcagctacttgggaggctgaggcgggggaattggttgaacccgggaggcggaggctacagggagtggagattgtgccactgtactccagcc[138 bp omitted]catggtgaaaatccgtctctactaaaaatacaaaaaattagccaagcatggtggcgggagcctgtaatcccagctacttgttaggctgaggtaggagaatcacttgaacccgggaggcagaggttgcagggagctgagatggtgccactgaactccagcctgggtgacagagggagactctgcctcaaaaaacaaaacaacatcccccaaaaaaacccacaaaaaatagaaacccaaaatgtcatatatttacacaatgggatattactcaaccatgaaaaggaataaagctctgatacgtgctacaacatggatgaaccttgccaacatgatgccgagtgaaagacgccagactcaaaagcacatatacgattctatttatacaaagtgtccagaataggcaaatccatagagacagaaagcagattagtggttgctacgggttggggagaagggaaaattgggaccaactgggaatagctatggagatagctattggggacggtgaaaaatgttctaaaattgactgtagtgaaggaggcacaactctgcaaacagactaaagacgatttaattttttttttttgagatggcgtcttgccctgtcacccaggctggagtgcagtagtggtgtgatctcggcttgctgcaacctccatctcccgggttcaagtgatactcctgcctcagtcgcccaagtagctgggattacaggcatgcaccaccacgcccagctaactttttgtatttttagtagagaatgggtttcaccatgttggccaggctggcctcgaatgcctgacctcaagtgatccacccatctcggcctcccaaagtgctgggattacaggtgtgaaacaccgcgcccggccaaaaccatttcattttgtactttatgattattcttttctttttgttttgccgtgttgcccagtctcgtctcgaactcctgagtttaaacaaccagcccaccttgcctcccaaagtactgatattacaggcgtgaaccagcgtgcccggcctgaattgtatactttatttaattaaatttatttatgtatttgttttgagacagagtctctgttgcccaggctgcagtgcagtggattgatctcagctctgcctcctgggttcaagtgattctcatgcctcagcctcctgagtagctgggattacaggtgtgtgttaccacacccagtaaaaaattttttctatttttagtagagatggggtttcaccatgttagccaggctagtctcgaactcctggcctcaagtaattcgctctccttagcttctcaaagtgctgggattacaggcatgaaccatggcacccagccctgaattgtatactttaagtgggtacttttatattacgtggatgacatatcaataaaaaatataaattaatgcaaaactcagcatattgccctgtggattggccaagatcaaagagatggatcaagtgtagacccagagaatgtggttttctcttgccattgatgaagtgtaggttggtaaaatatttttggaggtttttttttgaaattgactctgtgacatctattaaaggatgaaatgtgtatagtaccctttgactcaatgattttttttgagacagggtcttgctctgttgcccagattggagtgcagtggagtcaatcgaaactcactgcaacctcgaactctggggtttaagcgatcctgcaacctcagcctcctgagtaggtgggactacaggcaagtaccaccatgtccgggtaattttcttattttattttattttctttatttgttttgagatggaatttcactcttcttgcccaggctggagtgcaatggcgcgatctcagctcactgcaacctccgcctcccaggttcaagcaattctcctgcctc[132 bp omitted]ctcagcctcccaaagttctgggattacaggtgtgagccaccatgcctggccaattttcttattttatttatttatttattgagaccgagtctcgatctgtcacccagactaaagtgcagtggctctgcactttaatgcagatatcggctcactgcaacctctgcctcctgggttcaagtgattctcctgccttccgagtagctgggactacaggcgcctgccaccacatctggctaatttttaaatttttatttaatttttattttatttttagtagagatggggtttcaccatgttggccaggctggtcttgaactcctgacctcaagtgatccgcgcaccttggcctcccaaaatgctgggattacaggtgtgagccaccgtgcctggcctcaatgttttattgtaagagacttatcctgggaaaatacttgctccgctgtgaataagcgcagatatcagtgttcagtgtaacatttctttgaaatatcaactgagttaattggattaattcacgcccacaaattagaagatgattaatttgtggcagcctcagactatggaatgctaatgaaagtttaagaaagggatgaagtggtaaccaattagtaagaaatgatgatctttaatgtatttgttgttttgtttgcctggtggatgtctgcttgctgtttgctgaaataaatgtgtcttgaacacagagactttgttgggcttttttttccctcccaaatccccatgtctgtaataggaaaagctcaaaggtgctgagtaataatgtactaaatgattgagtttgtgttttccatatcaaatgctgtctcaggcacattgtttattttgaagaatgtacacatttaataagcacatacaaaaaatatatattatacatatacatattcttttttcttttctttttctttcctttttttttggagacagggtctctctctatcacccaggctgcgttgcactgtcatgatctcggctcactgcaacctctccctccttggctcaagccattctcccacctcagcctcccaagtagctgagaggacaggcgcatgtgccaccacatctggctaatttttgtattttttgtagagacggggttttgccatgttacccaggctgacctctaactcctgacctcaagtgatccatccatgttggcctcccaaagtgctgagattacgggtgtgagcacaatatatttgaatgaacaataaataacaacaaagataaaaactcctgcaaaagtaattacccagagatgacgcggaatgtctattttctctatttcctgctgtttataattattattttttaatggacaacctggaaaacaagaagcatttctggccttgaatgccaccctaggactcgtcaacaccctgcccacagaagtccccatgccttttctcgtcctgatgtgtcttcagggttggatggaatttctggagattcctcctggggctccccaggcaatggccaaattcctagagtcaggtggatggagggaggtcttctgaagcctggggcaagagtgatgtaagtgggaatgaagtcggtggaaaagt[131 bp omitted]cgaaaccctgtctctactagaaatacaaaaatgagctgggtgtggtggagggcgcctgtaatcccagctacttgggaggctgagttaggagaatcacttgaacccctgaggcagaggttgccgtgagctgagattgtgccactgcactccagccccggcgacagagtgagactccatctcaaaaaaaaaaaaaaaaaaaaaaaaaaatctattcttattt[165 bp omitted]tgcctcagcctcctgagtagctgggattacaggcgcccaccaccacgcccggctaatttttgtattttcagtagagacagcatttcaccatattggccagactggtcttgaactcctgaccctgtggtctgcccgcctcagcctcccaaagtgctgggattacaggcgcgtccagccttccatcaattcttcaatctcctcttttaccctatgcctgtgggctctgatggggttgacctcttggtggggttgactcatctttgctcctgcccccaagaggcccacagacacctccccatcctctgcattgtgagggtatctcttggtgcagggggagggggttcaggaggggcacatgggcaacaaggagttgtttgggctttgaagacaatattggggcagatcagagtgggggtgacaaaggcatgaggttggcctttgctttctagaatcttgttgttcaatgtctttctgacattggggttcctctcggtgtctggacattcattcttgaaacactgtccttgctctctgtttttttttttttttaattttattttttgagacaggatctctctctgtcacccaggctggaccgcagtggagtgatctcaggtcactgcaacttctgcctcccgggttcaagggattctccttcctcagcctccagagtagctgggattacaggcgcccgccaccatgcttggctaatttttgtatttttagtagagacagggtttcaccatgttggccaggatggtctcaaactcctgacctcaggtggtcagccctcctcagcctcccacagtgctaaaattacaggtgtgagccaccgcacctggccggccctgagtttaatttgaatgaatcaacaacatatattcaataaggtgtctttaaaccgaaacacgcatgaaccagggtgaggtattgatcgattgatgacaatagtgtgagcagagccttgtgggaccccaaatctgtatttcccctgggagcaggggttccttattggctgagaccatgttcatggcaacttttttttttttttttttttgagacagcgtctcactctgttgccccggctagagtacagtggcgcgatctcggctcactgcaacctccgcctcccggattcaagcgattctcctgcctcagcctcctgagtagctgggactacagtcatgcgccaccacgcccagctaatttttgtatttatagtagagatggggtttcacca[139 bp omitted]ctgcctgtatttatttatttttaatttcttttatatatattttttgagacggagtttcgctcttgttgcccaggctggagtgcaatggtgcaatctcagctccctgcaacctctgcctcctgggctcaagcaattctcctgcctcagcctcccaagtagctgggattacaggcacctgccaccacgcccggctaattttgtatttttagtagagatggagtttctccatgttggtcaggctggtcttgaactcctgacctcaggtgatccgcccacctcggcctcccaatgtgctgggattacaggagtgagccacccgtgcccggcctgagaactgtctgtatttattaagtgctcagtacattcaagggactgatctaggcacctccagagagttaacgggtgcagtccttgttctcagggaactcgttgttcaagtgggggaaggcaggcgttactcaaagaatcacagaataggctgggcgctatggctcatgcctgtaatcccagcaccttgggaggctgaggtgggtggattgcttgaggccaggagttcgagaccagcctgggcaacatagcgaga[131 bp omitted]gtgaaactctgtctctactaaaagtacaaaaaattagtcgggcatggtggtgtgtgcctgtagtcccagctacttgggaggctgaggcaggagaatcgcttgaacccaggaggggagattgcagtgagccaagatcacactgagacagaaattaaaagagagaaacagaataaagcaaaggttaagtgagaaacactgcacttcatcctgggccacagagtgagactccatctcaaaaaaaccccccaaaaccaaaaactaaacaaaaaaagcctgggcctggtggctcacgcctgtaatcctagcgctttgggaggccgaggcgggtggatcacttgaggtcaggagttcaagaccagtctggccaacatggtgaaaccccgtctgtactaaaaatacaaaaaattagccaggtatggtggcacgcgcctgtaatcctagctactcaggaggttgaagcaggagaatcgcttgaacccaggaggtggaggttacagtgagatgagctcacaccactgcactccagcctgggcgacagagtgagactgtgtctcaaaaataaataaataaataaataaataaataaataataataaataaaacaaccccccccaccccgccaaaattagccaggcggagtggcgtgctcctgtagtcccagctacttgggaggctgaggtgggaggatcgctggagtctgggaggttgaggctgcaatgagcagtgattccccgacctgcactccagcctgggcaacagggtgagaccctgtctcaacaaacaaacaacaaacaaaactccccaaaagcccacgacccccccaaaacacacaaaaaacaaaaagccacatgccaagaattaataagtaactctggatgagggaatcgggtccttgtagagaggggagttgttccagaattgcaggtggaggcactaggcactccggtgaccgtggcggcgagagtcaagctgggaagacactttccaggcgcggggagcaagatctctcagcctccaggtgccctctctgccccttggcattcccccaccctgcccctctgtctccccctttctctgttcctcagtttcccctcctcgttgtcccttgtggggtcccagtgtgtgagttgctttgtgtctacccccttccagggtctgacaagcagaaggagttttcattatatcctggcagtctgtcccccaacccccaaatcggatctaattctgctctgctgaggctggcctggcctggcctaagaggattggaacatttgctaaatgggactaggacagggtgagagaggcgtcgctggggagacccaggtgccaggacggccaccagggggcggcagaggacgagggagaccagaagacagaggggacagagaagggcgtggtgggggcggggtgggggtggggtggggagaggcagggagtggatacaggcatattccctggctgtttagggaaccacatttaaggggttagaagggtgccaacattgctgattttttttttttttgagacagagtcctgctctgtcagccaggctggagtgcagtggtgtgatctcggctgactgaaacctctgcctcctgggttcaaaggattctcctgtctcagcctcccaatagctgggaatacaggcacccaccactacgcagagcatattttcgtatttcagtagaggcggggtttcaccgtgttggccaggctggtctcgaactcctgaacttaagtgatctgttcacctcgacctcccaaagtgttgggattacaggtgtg[133 bp omitted]caacatagcgagaccctgtcttaaaaaataagaataaagtttatcattaacctctaccctgactttctactcactctcccctctctgttcctttagggataatgggggcctggagagtgggaaggggagtgcaagcatgggggtctggaggtgtctgatcaacgacctcagagatgacctgaggtttcctgagctgggaatgttttggaagggtctgaactgcaaggaatctttgcagagtcctggggtctacctctgatgtgaagcatcttgcattttggagctgtccaagtaaaacatgaaaaagaatttgatacagaattaaaaatacatttttgttttttctgagactgagtttcgctcttgtcgcccaggctggagtgcaatggtgtgatcttggctcactgcaacctctgcctcctggactcaagcaattctcctgcctcagcctcccaagtagctgggattacaggcatgtgccaccatgcctggctaattttgtatttttagcagagagggagtttcactatgttggccaggctggccttgaactcctgaccacaagtgatctgcccgtcttggcctcccaaagtgctgggattacaggtgtgagtcattgtgcttagctcaataaatagataaattatatatatatatatatatatatatatatgcaaatatatatatatatattttttttttttgagacagtcttgctatgttgcctaggctggagtgcagtggtgtgagttcggctcactgcaacctccgcctcccgggttcaagcgattgtcctgcctcagcctcctgagtagttgggattacaggcgtgcaacaccatgcccggctaagttttgtagttttagtagagatgggtttttaccatgttggtcaggctggtctcgaactcctgacctcgtgatccacccaccttggcctcccaaagtgctgggattacaggcatgagccaccgcacctggctcaaagaatactttaagtaaaattcaaaatcttcaaaagtgtttttaaaattccacgcttttaatttctacttcatgccaggcccagtggctcatgcctgtaatcccagcactttgggaggcccaggcaggaggatcacttgagatcaggaggttgagaccagcctgggcaacataatgagacccccgtctctacaaaaaaaaaaaaaaaaaaaagcaggtgtggtggtgtgcacctgtagttccagctactcaggaggctgagacgagaggatcatttgagcccaggaggttgaggcttcagtcagccgagatcacgtcactgcacttcagcctgggcaacagagcaagaccctgtctcaaaaaaaaaatgtaaaagaaataatttccaatacagtaagtagcaatagatatatagtcaatatcaacaaaagctctttgagccttcggttactttaaatttcaagagctggagaggaccctggagtgtttctttgggacttgggacaagtcttatttagactctgggtcatgtgtagcggggtagttgagggcacggttttgagaggcaaacacggctgacccaaatattgtttttctgtttatttatttatatttatatatatatttttgagacaggatcttgctctgttgcccaggctggcatgcagtggtgtggtgagtctcggctcactgcatcctccgcctcgcgggttcaagcaattctcatgcctcagcctcctgagtagctgggattataggcgcacaccaccatacagctaattttttgtatttttagtagagacggggttttgccatgtgggccaggctggtcttgaactcctgagctcaagcgatcctcccaccttggcttcccaaagtgctgggattacaggtgtgaaccactgtgcctggccttctttttaattttttaaaattatatttttttggcctccttcccctcctaatatattttattttgtagagatagggtctcactatgttgcccaggctggcctcagtctctaatccatagcctcaaatgatcctcctgccttggcctcccaaacccctgggaatttttttttttttttttttttgagatggagtctcacgccgtcgcccaggctggagtgcggtggcacaatctcggctcactgcaagcaacgcctcccaggttcatgccattctcctacctcagcctcccgagtagctgggactacaggcgcccgccac[185 bp omitted]aatgtgagcccagttttatacactggtggattatttgctattctcacttttgaaatgcctgtataagtcttctgcaacctggttgaatatcaggcattgatgttttatgatctcaaatggtggaacaagggagatcagtgtccttgccctggggatcagcctgggaggcccaaggctagttctcagagctgtggagttcggcacccactgggtcccaggttcccacctgagcagttgttctcacaggtaaggcctgaatgctcacagccaccttgtggtgcagacacacagataactccattctacaggcagggagactgagcctgggaaggagggaggtgcccacaggtcccagcttctcacacactgcatgaaccacagaccttgggaacaagatctcagggaacaataactccatggaaacttcctcccaggcggcttctggtatcatccccactttacagaggaggaaactgaggctgagagaagtgtagtctccagttctgtctcccacgtcagcggcagagccagagctgggccagcacctgccccggagcctgtgccctcctgatcaccaggtgatatggcctcttaggatgctcgccacagccccacggagctcagaggtccctttctcagaggaggaaactgaggctgagagaggtttcgtcaatttccgaggtcacacaggtgatgagtggaagaaccaggggtagaatttaaatctctttggcccccgagccccgctcttcacccccgagtctgcctgggattcctagaagatggatgaggtcagcttcctcccctgctcccatgggattcccagggctcattgtgacagcttgtcactgtatccactttgcagaggaggaaactgaggcccaggagcccatatgaagggcccaaggccacgcagtgagaaaacaacaggatttaaacccaaactcatgtggctccatgccagctcttggcaagaccctcccgactcagccatgttcagggccctcccttgttggccctgccagcctctctctgccgcatccgtaggctcctctgtccagtgaggacaaggagctgagtggatgcacccactaccaggcatgggacctggtagaagcagggattcatggcacagttagagcctgaatgaattaactcaggaacaatatgatccctgaagcatccagagattcaaacactagtgggcagccccacagtctgacctcacagtgctgcaatcacagacccttggtccttttgggaaaacatcacaccacttctctgtgccagtgtctctacctggttctgccccaccatccatccatccatccatccatcacccatccatccatccatccatccacccatccatcacccatccatccatccatccatccatccatccatcacccatccatccatccatccacccatccatcacccatccatccatccatccatccatccatcatccatccatccatccatccatccatcatccatcacccatccatccctccatccatccatccatccatccatccctccgtccatccatccatccatttctttcacatttattgaacacacacttactgctgtgtgtctgggacagtcctaggtactgggaatacagctgagaacaagacagacagggccccatcctcctgacaagggcagacaagaaacaagatgtcagtaagagttttgcaaaagattaaataggatgaatgtgttagggagctaagggggtgcaggtatgaggagcacccccatcctgcagtagagcctggagtgaaactcatcaacaacctgatccaaggatcctccagtattccatacatcttcagactgtccccagaatttaaccccactttttttgtttattatactttaagttctagggtacatgtgcacaacgtgcaggtttgttacatatggatacatgtgccatgttggtttgctgcacccattaactcatcatttacattaggtatttctcctaatgctattcctccccctgccccccaccccacaacaggcccctgtgtgtgatgttccccaccctgtgtccaagtgttctcattgttcaattctcacctatgagcgagagcatgcggtgtttggttttctgtccttgtgatagtttgctcagaatgatggtttccagcttcatccatgtccctgcataggacatgaactcatccttttttatggctgcatagtattccatggtgtatatgtgccacattttcttaatccttaaccccactttttccagctgcaatcatgtgcattacaataagtctcaaagtcaggtagcgtaagttctccaactcgttttatttttccaagactgctttgattattctagatcatttatattccatagcaacttcagaatcagtttgacaatcaatttctacagaaaaatcctgatgagattctgattgggattgcagtaaatctaaagattagtttgagaagaattgacctcttaataacattgagtcttctaaaccatgaacatggtatagttcactattgacttgagtctcctttaatttcttccagcagtgctttatattgtttcagtaggataatgatctgatagaagagatgacaggacttatggatggattggatgtaagtggtgaggagaaaggggttaggggccaggctgagtgcccagatttctgcctgagccactgggtggagatgagaaggaaagcaagttgcctcagaagacctagctcagagaagaagtgcttggatttgatttcagcttacttgatcccagggccatgtgcaggaccagctgaaacccacctctctgtacccccacccctggaaggactctggatccaggagccaaccagtacccagattccccagggcaggtgatttaagagttgctgacaccttctctgtcccgctggaagttattttctcctccctctccctgtacagctgaccttccttccctgctgcagggccagggggtctgttccaggactggattctcccatcaggagcctctggactggtcgccgagggtcagacggcccctccctctcttgctgtcatccctggctcttcaagctaatgagacctgtcctgattcctcagccaggcctgtagccttaatctctcctagcagggggtttgggggagggaggaggagaaagaaagggccccttatggctgagacacaatgacccagccacaaggagggattaccgggcgtgtgtgtgtgtgtgtgtgtgtgtgcttgcgtgcgtgtttgggtgcacggggaagtgaaacagacccgtgtgggacccaggagctcagggacatattaatatctagagagacagacgagaggagagagacacaaagagggccagagaccaggaaaatcagaaatacagagcaacagaggtaccaagacagggagaaggacagaaatgaaaggaaatcctcccagctactcgggaggctgaggcaggagaattgcttgaaccggggaggtggaggttgcagtgagccgagatggtgccactgcactccagcctgggtgacagagcaagactctgtctccaaacaaaaacaaaacaaaacagaaatgaagggcaatccagggagaggggaagcaagaatcagagagagagagagagagagagagagacagggaaaaagagaaggaggaacagagattggagctgcagaggataagcgaggacagagggacagagatgaggctggagttacagggacaggtggacaggcagaaagacagcaaagggagggacagacagacaggaacagaaggacatggaggctgagggagaggggagaaagagcaagatagacagggagacacagagaaaaagaataagagagaccaaggggataatgcaggtttatcaacagagacagggacggagaggagcagatggagaatgaaagagtggtattcaggaaagtaggcagaaatgccacagcctaaggcccacaggaaaagaaactgaggtacagagaagccagacaaagaccaatggtgtgtagagagatggtgagtgctgggtttgttggctcacgcctgcaatcccagcactttgggaggccgaggtgggaggattgcttgaggccaggagtttgaagccagcctgggcaacatagagcgactccatctctacgaaaataaaaaaattagctgggcatcgtggtatgtgcctgtaaagtctcagctactggggaggctgaggagggaggatcccttgagcacaggaggtcaaggctgcagtgagctgtgatcatgccactgcactccagcctgggcgacagagtgagaccctgtctcaaccaaaaaaaaaaaaaaggaaaaaaaaaagaaaaaaatcccaaaccccaaactccaccaaaaacagaaaaacaaaacaccctttctaataagtctgcctattttcagtgctggaagcagcccctgccacctccgcccccaaaaagaggagaatatcatgtctgacaacacagagacagagaggccacagacaagacttgaccaagtcaaagagagagaaacaggggaaactgaggcagaaaccgagaccaatgaggcactacagagataaactagctgtcggacagactgttgtggagagaaagggggacccaggagagggatcccgaaagctccgtgcctctcttttttcagacgatctctcaggaccatctgacagtgctctccttcctctttgatgcctctctcttgggatactagctgaagctggagagacaccagttagacctaaggaaggacttccctgaggagtaggggcttatggtcaccggcaggagctggggcctcccttccccatcagccctaattgccaagatgtcatggggggaagaggaggggattaagcagacgggtgcccctccccctcccagccaatgtcacctcctggtgcccagtcgagtcccccaccttggccgggattaccctccgagttccaggccatgacaaatgacatcactcccggcccaggcttaaaatctccccatgtgaggggatgtgtttccttcagcctctgctgtctggccgctctgtctaggtcctgggccacgggagagccccgtccctcctttctgaaggtgagcgtctgcaggagaggcggaggggaccgaggaggggagaaaaaagagaggggagaagttgggtttatcttattcgtggctgtgtttgccgtgctctgcaggtgatgtttgctgaatagtcacacacaaaacagaggtgccgtcctggcatttgtggaaacggggctaggctgtgattgcagcaggagggagtaaggttagacagcagggactggctgatggcactcggggcattgggaggattcagggtggcttgtgggcaagggggtcccctcaagccctgacggcatccggggttgggggcttctcaccgtggttctaaggcaactcctcagcataccgctctgttggatgttctttaaaactcttagcactgcctgaaattttcatttgcgcgatgatccacaaatggcctgtctccctcccttgttgagcactgatttttccccagtgcccagcgtgtggttgggatttgcctaaatatgtgttgcatagatggatggatgaatgacagacaagggacggaacagacatatacgcagagagcccaggtctgtggctgcaacaggaagaactccgggtggacttgggcctgcccgagagagccaggaatgtgatgactggggatcactgtgctggtgaattgatcacttagggcctcaatgcacccagaggctctggctttcagcccaggctctacttcgggactggggaatcctcacgcccccgccctcttagcttccagcacagtcactctctctgatcttctttctgcaaagtttttttttgtttgtttttgagatggagtcttgctctgttgcccaagctggagtgcagtgccacgatctccactcactgcaacctctacctcctaggtccaaggagtccatccacctcagcctcttgagtagctggaattacaggcgcgtgcccccatgcccagctattttttgtatttttagtagagatggggggtctctccatgttgtccaggctggtctcgaactcctgacctcaagtgatcagcccgcctgagcctcccaaagtgctgggattatgggtatgagcctctgcgcccagccggtctcctgcaaaactcttgattgacaccttgtttcccgtctgcccctgtcaggagggctgaggccttgtctgtcttgctctcggctgtattcccagtgcttgggtcagtcctagacacacagtgagtgctcagtgaatatgcagggaatgaatgaatgaatgaagggcagaagggtagaagcaggtagacagactgccacagagaggaggtgtgatgcggttttcccaaaaggaacgagcgagggctgtgattgccacagagtgaggtccgacttcagggctgcccactgtgtgtgaatttctggatgcttcagggatcacattgttgatcacggagttgatttgctcaggctctaactgtgccgtggatcccagcttcccccaggtctcatggccggcagtgggtgcatccacccagctccttgtccccgctggacagaggagccaacagaggctgcagagagaggctggagtggctgacaagggagggccctgaatgtggctgagctgggagggtcttgccaagggctggcatgaagccacatgagtctggttttttttttttttttttgagacggagtctcactctgtggcccaggctggagtgcagtggcatgacctcagctcagtgcaacctccacctcccaggttcaagcgattctcctgcctcagcctctcaagtatctgggattacaggcgtgcaccaccatgcctggcttatttttgtatttttagtagagatggggtttc[143 bp omitted]cttggacccctcatgtgggctctctgggccttggttgcctcctctgcaaagtggggacaatgataagctgtcaccatgatccagccagatgagccatattgcaggcctggcctgcagtgggagcagggcaggagaccagcctcattctgtttctagggtccctaggtagacttgggggtgaagagcggggctcgggggccaaagagatttaaattttacccctggttcttccactcatcacctgtgtgacctcgggaattgacgaaacctctttcagcctcagtttcctcctctgagaaagggacctctgagctccgtggggctgtggggagcatcctaagaggccatatcgccgggtgatcaggagggcaccggctccggggcaggtgctggcccagctctggctctgccgctgacgtgcgagacagaactggagactacacttctctcagcctcagtttccttctctgtaaagtggggatgataccagaagccgcctgggaggaagtttccatggagttactgttgcctgagatcttgttcccaaggtccatggtgcatgcagtgtgtgagaagctggggccccctggaggtccttaaggtcatcagccacctgaactgtgggcacctccctccctcccaggctcagtctcccccgctgtagaatggagttatctgcatgtctgccccaccaggtggctgtgagcattcagacctcacctgtgggaacaactgctcagctgggaacctgggacccagtgagtgccgaaccccacagctctgagaatcagcctggggcctcccaggttgatccccagggcagagacactgatattctttgttccaccccttgaaatcataaaacatcagtgtctggaaattgttgtcattgtgagatcttgtatataaagcctgggccaagtgtctgccgagtgatgaattcctggacattcttttttttttttcctccccaggagacaggtcctctttcgattgattgattttttttttttttttttgggatggagtcgtgctctgtcgcccaggttggaatgcagtggtgcaatctcagctcactgcagcctccgcctcccgagttcaagagatttttgtacctcagcctccccagaagctgggacaacaccatgcccggctaatttttgtatttttagtagacggggtttcaccacgttggccaggctggccttgaactcctgacctcaagtgatccgcctgcttcagcctcccaaagtgctgagccactggcctggcctgttttgttttgttttgagagaggatcttgctctgttgcccaggctggagtgcagtggctggatcatagctcactgcagcctccaactcctgggctcaagcgatcttcccacctcagcctcccagagtgctgggattacaggtacgtgccaccacgcccagccctcactggaggcccttctgtcatcagctgcctcaggttgctgccaaacccagggaaagatttcagtggatgttcaatattattattgttattattctctgctgacatcttgtctaggcagcactttatcattattatcagctgtttgatctggggcccacactttcctcctgctgagcctcctctcccctatccgttaaaagggatgatcctggccaggcactgtggcccacgcctgtgattccagcacttagggaggccgaggtgggcggatcacctgaggtcagaagtttgagaccagcctggccaacatggagaaacccaatctctactaaaaatacaaaaaaaaaattagccaggcatgatggcacatgcctgttgtcccaggttgggaggctgaggcagaagaatcgcttgaatccgggaggtggaggttgcagtgagccaagattgcgccactgcactccagcatgggtgacagagactccgtctcaaaataacaacaacaacaaaaacaaaaacccagaaagtggtgatcgtaaatgtgagctttcttggctttcctggaaggttaactgcttagccaggcaatctgactcagatttgacggcgaagacaatgaaagtgtgtgcttttgttccaggccctgcaaatggtccccagtggggcaggttcaccagtttccttgtctccactctctggaggttcatatttaacattattggtttttggagaagtgggagaggacagagggaacccaggttagggggctgggggaataggaccttcaggaattactctagccttgaaatcctggattctccactgccagcctgtgtgtgatcccgggtaagtcacactttcgagcctgaagatgttctctaaactgtaagcatcaggcaaaagcagtgtctcatgcctgtaatctcagcaatttgggaggctgaggcaggaggatctgctcaggccaggagttcaagaccagcctgggcaacatggcaagacacctctctctacacaaaaatttaaaaaattagctaggcgttgtggcacacctgtagtcccagctacttgggaggctgaggtgggaggatggcttgagctcaggaggtcgaggctgcagtgagctatgattgtgccactgcactccagcctgggtgacagagtgacatgctgtccctaagaccaaaaccaaaaccaaaatgtaagcatcatagtaatacagtctctacctcccaaggttgtgctggggatttaatgactacctgtatagagaaggcttgtgtattagttaactattgctgggtaacacttatcctaaaattgagcagcttcaaacaataaacatttctgatctcttatagtttccaagggacaggaatccaagagtggcttaactggattattccggctcagggtgttccatgtggttgtggtcagatgtcggccaggactgaagtcacttaatggcttggctgaggctggggaactaacctccatggtagcttactctcatagctgttggcaggaggcctcatttctttgccacatagacctctccgtgggatggcttgagcatcctcacaacatggcggctggctttccttagagctagccttggaagccacgctctgtcatttctgcaatatcctgttggttacacacgtcagccagcttgttagtagggactacacagggcatgaatatcagggggtaaggattattgggagttaccttggaggcagtttgattttggggatttaatgtagctgcttttgattttattgtcagcactgagccttctcgtgacattcctaccaggttttacttgttctttctgcttttctccatgatcaatctgctatggtcacacagggtgccttgtttcttctccaacaagaccaagttggagaccctgtcttgctcagggtgacggtgtgagattccagcctccaagcctttgcacctgctgtttttttaattttttttttttgcctggaaatctctattccagatccacacaaattcctagatgcctcacccaccccaaatgccttcactctcataacaacctgttttattttcctgggagttcttgaaactttctgaaggctttttttttttttttttttttgacagagtcttgctctgttgcccaggctggagtgcagtagtgccatctcagctcactgcaacctccgcctcccgggttcaagcgattctcaagtagttgggattacaggcacccatcatcatgtctggctaatttttgtattttagtagagatggggtttcaccatgttggccaggctgatctcaaactcctgacctcaagtgatcctcataactcagcctcccaaagtgttgggattacaggcaagagcccctgctcctggccatggcatct[154 bp omitted]tctactaaaaatacaaaaattagccaggtatggtggcaggcccctgtagtctcagctacttgggaggctgaggcaggagaatcacttgaccctgggaggcagaggctgcagtgagccgagatcaagccattgcactccagcctgggggacaagagtgagacttcatctcaaaaaaaaaaaatttttttttccttgtttgttattggtttctctaggaacggaaccaagaagttcaattctatgagaacagagaagctgcggtcttatttcttcctatattcctagttcctagagcagggaaggcattcaaaaaatatttactgaatgaacagtagaatctcaacttaaaataaacagaatctgtccccctcctcatgtgagggatgagaaggaaaggacagtgagaggaacggaagagtgggagctcacaataaacaccatccatttttaattctttttcttatgtttcaaatatttattgggggtgctggggacatggcaggaaccgagatattaccagtccctgaactcaggtaactgatagaatttgagggagagagatagataaacaaacatataaatatgtcgtttaatacaagctgtgtcttgaagaaaaggaggtagggagcgtgtgtgtgtgtgtgtaaaatccagtttaggggcgtaggttgctttctctggggaaagtagctgagctgagacgtggaggagaaggggttagctggtgagaggggctttggggtgggggagaggcgttcctagcccaggaaacggcttatgcaaatagctgtggagggtgagaggttttctgagtccatcctaatgagggcaatgaggaaccctcagagggttttcatgttctgtttgcttttttgaagattttattgttgtttttgcttttgacaagaacacacacacacacacacacacacacacacacacacacacacacacacaattaaaaagtaatccaaactatagagacaagatatggctttagcattccttcccagaggcagtcactggtgccagtagcttgcttccttcctgggaattttctacgcatatacaagtgtatattctacacatgagtaaaatcaatgcctcattttgtttattaattcataattataatacttattatttttgagatggagtctcactctgcctcccaggctggagtgcactggcataatctcggctcactgcaacctccacctcccaggttccagagggtctcctgcctccgcttcccaagtagctgggattacaggcatgcaccaccatgcctggctaatttttgtatttttattttattgtatttttatttttaaatttactttattattatgactctttttttgagatggagtttcgctcttgttgcccaggctggagtgcaatggcgtgatctcggctcactgcaacctctgcctcccgggttcaagtgattctcctgcctcagcctctggagtagctgggattacaggcgcccaccaccacgcctgcctaattttgtatttttagtagagacagggttttgccatgttggccaggctggtcttgaactcttgacctcaggtgatccatctgcctcggcctcccaaagtgctggcattacaggcgtgagcaactgcacctggcctatttattgttattattgagacaaggtcttcctctattgcctaggctggtgtgcggtggcatgctcatagctcactgcagtctccaaatcctgggctccagtgatcctcctgcctcagcctcctgagtagctgagactacaggtgcggaccaccatgcctgaccaatttttgtatttttttttttgtggagacagcgttttgccatgttacccaggctggtctcgaactcctgggctcaagcaatctgcccaccttgacctcccaaagtgctgagattataggtgtgagacacagcacctggccatctgcattgttttaaaaatcacaaatggttgcgaggtatacatactgcccagcaccatacttgtttcctttgaatatataaatattataattttataatatttataatatataataacacaaataataataaatatatatggtttggtcatatacaatatataaaataacattcacaaacacttattgtcaaagtgcaattaaatgggaaaaaaagaaaaacatttggccaggtgtggtggctcatgtctgtagtcctagcactttgggaggctgaggtgggaagatcacttgagcccaggagttggaggctgcagtgagctatggcaacgccgctgcactccggcctggatgacagagggagaccttgtctcttaaaaaaccccaaaaaacaaatctgattctctgacgcatatataataagcacaggtcaaagatttatttaag[136 bp omitted]tggtgaaaccccgactctactaaaaatacaaaaattagctgggcgtggtggcgggtgcctgaggtcaggagttcgagaccagcttggctaacaatggtgaaaccttgtctttactaagaatacaaaaaattagctgggtgtggtggctcatgcctgtaatcccagctacttgggaagctgaggcaggagaataacttgaacccaggaggtggagtttgcagcaagccgagattgtgccactgcactccagcctgggcgacagaacaagactccattaaaaaaaaaaaaaaggagaatttgatgaacagaagttgataggtttagtcaggaaagacgggctggagaaaatttgccaggttagatacaaaactggttaaagacctacaggacaatacaactgtaacctttgaggttaccttttctaccagagagaaatcatttgcaaccaaacttcctggggttaccatttaccttgtcgaagtctagactctaatcaataatgaataacagaccgggtgtagtggctgacgcctgtaatcccagcactttgggaagc[134 bp omitted]gaggcaggagaatcgcttgaacccaggaggcagaagt[133 bp omitted]cccggtttgtagtctgttaggcatggggttgcacagctggtgagcaagcattactgcctgagccccgcctcctgtcagatcagcggtggctctagactctcacaggaacgtgaaccctattgtgaactgcacgtgcgagagatctaggttgtacactccttatgaaaatctaaggcactgcccactcccatccatggaaaaattatcttctacgaaaccagtttttggtgccaaaaaggttgaggactgctgccttggaatatgaagcaaactttgggtgggtctgttagacaagactcccagatgacttggaaatggcatgctgtcagctttttttgtcttattgccgagcctagaactttttttaatttttattttttttgagatgaagtcttgctcttgtctcccaggctggagtgcagtggcacgatctgggctcactgcaacctctgcctcccgggctcaagcgattctcctgcctcagcctccagagtagctgggattacaggcgcctgccaccacgcccggataatttttgtattttagttgagacgtttcaccatgttggccaggctggtctcgaactcccgacctcaggtgatccgcctgctttggcctcccaaagtgctgggattgcagatgtgagccaccacacctggcccctagaacaattttttaaaactatataatggagatcttttaaaatcagttcagagagcagccttatgttttttttttttttttttgagacggagtctcgctctgtcgcccaagctggagtgcagtggcttgatcttggctcattgcaacttctgcctcccgggttcaagcgattctcctgcctcagcctcccgagtagctgggattacaggcacgcgccaccatgcccggctaatttttgtattttctgcagagacggggtttcaccatgttggccaggctggtctcgaacttctgacctctggtgatctgcctgccttggcctcccaaagtgctgaaattacaggcatgagccactgcgcccaggcttactttaaaaaaaaaattaattttttgtagagacaggagagtttcgctatgttgccacctgaacataaatgctattttctttttcttttcttttcttttttttgagacggagtccgtagcccaggctggggtgtggtggcaccattttggctcactacagcctccgcctcccaggttcaagcgattctcctgcctc[134 bp omitted]tggtctcccaaagtgctgggattacaggtgtgagccactgcgcctggcccataaatgcgattttcattcccattttccaacaaggcgactgaggtatacattgaaggtgaattactaggacaaaagaaagatggcattttacttcaataacagtttgttacaacctgtactgctacctatctgccatgggagtgtgcctttccccacactgacaccagtgctggaagttatcaacctccttcatctttgccaacctgataggtcaaaagtgatcatggaagatccacactcgctttttttttttttttttttttgagataggggtctatttctttttcttttttcagagatggggggtctcactatttctttttctttttttcagagatgggggtctcactatgttgcctaggctggttttgaacttctgggctcaagtgattctcctgccttgacctcccaaagtgctgggattacaggtgtgagccgccttgcttagcccttactg[142 bp omitted]ttctcctgcctcagcctcccaagtagctgggattacaggcacccgccaccacacctggctaatttttgtatttttaatagagatggggtttcaccatg[137 bp omitted]accaatccagtttgcctgggaccattctggctctagcactgaaagtcctgtgttccaagaaacacccacctctcctccaacctgggcaaagagggacggttggtcaacctgcagtcctgggttataagtgaggctgagcgtgtttgcccatggtcaagaaagaagggatcttggatgagggtgtgtaacaggatcagatttgttttgtttttttcttagagtcttgctgtgtcacccaggctggagtgcaatggcctgaacacagctcactgcagccccaaactcctgggctcaagtgatcctcccacctcagcctcctgggtagctgggattacaggcatgcatcaccacacccagttaactttttaaagaacactttttttttttttttaagagacagggtcttgctatgttgctcaggctggtctcaaactcctgggctcaagtgatcctcccgccttggcctcccaaagtgctgggatgacagatgtgagccattgtgcctagccaggacgagatttttagagggtagagtaggaataagagcttgcacttatgaggcacatgatggcttcagctgtctgctttgcagagtctcaagaaagctctgagaaccttaagcagaggccattttacatgtgaggacacagaggtacagagaggtgagataaatggccaaggtcacatacctaagaggagaaggaggcaggatttgaatcgcagcctgcacgtcaccccatggtgagtaactggtaagtgagtgagcatccctcctcttctcttgcaggccccctgacttgggcctcagtgtccccgaagatcatgatggcgtatatgaacccggggccccactattctgtcaacgccttggccctaagtggccccagtgtggatctgatgcaccaggctgtgccctacccaagtgagtacagtcgtttctcttggcaccccaggctggcctcatctcttggaggacctctggggtccctttgcccccaggaagaaggcaatcacaggggcgacttcagggccatacaccagccctctgggttcatctgaaatgtatgtcacttagaaaaacattagcagtcctagaaattcaggacagaggttccttttggggtgaggaagaggggatgtaatctggaaggggaatcaagaggaattttcatctgttaccaaaactttattatttatttatttttcagagacaaggtctcacactctgtcacccaggctggagtgcagtggtggtggtcacggctcactgcagcctcgaactcctgggctcaagcaatcctcccacctcagcctcctgagtagctgggactgcaggtgtgagccattgtgcctaggcccggggggcactttttttttttaattttatttttgagacagggtctcactctgttgcccactctgaagtgcaatggtgcaatcacagctcactacagcctcgaactcctgggctcaagcgatccttttgccttggcctcccaaatagctaggattacaggtgcacgccaccatgcctggctaacttttttaagtttttgtagattttgcaggatctggattatacaaaacatagaaaaaattattattatttttttttttgtagagattgggtctccctatgttgcccaggctggtctcaaactcttgggtccaaataatccgcctgactcagcctcccaaagtgctgggattacaggcatgagccactgcacctggcctgcaaagccttatttctttttctttttttttctttcgagacacagtttagacggagtttcgctcctgcccaggctggagtgcaatggcgcgatcttggctctttgcaacttttgcctcccaggttcaagtgattctcctgcctcagcctcccaagtagctgggattacaggcgcacaccaccatgcccggccaatttttgtaaagccttatttttaagagaagtgagtactcagttatttgtagcattattctttagctcttgtttttttttttttttttttcaagaccgagccttgttctgttaccaggctggagtgcagtggcataatcttggctcactgcaacctctgccttctgggttcaagcgattctcctccctcagcctcccgagtagctgggactacaggcatgcaccaccacacctggctaattttttgtatttttagtagagacaggggttccccatgttggccaggatagtctcaatttcttgaccttgtgatctgcctgcctcagcctcccaaagtgctgggattataggcgtgagccaccgcacccagcccagacttgctacttttataggctagaaacggttgaatgtcagcaatgtcatgcttcaactgattatgtcttagtgcataagaaagtttagaagagggaaaaacgactcgcacacctccttgttgagctaaagccttggggtcaggcatgagccacagagtgccaggcacacagtgaggtgtagaagggcagggaatgtgtattccatccttagtttaggcagatggcaaccaggatggaattcttggcatcccacccagcctcagggcctcacaccagcccatgtggatgacctgagggtcctgtttcccatcccaccccaggcgcccccaggaagcagcggcgggagcgcaccaccttcacccggagccaactggaggagctggaggcactgtttgccaagacccagtacccagacgtctatgcccgtgaggaggtggctctgaagatcaatctgcctgagtccagggttcaggtggggtggtgggtccctggacccctcccgacacttcctgtgatctcaggaggcctgcccggaacaaagagtgatgggaggagggagagatcacagagtgacagccaaagttataaaggggacaataatccctctccccaccatcccactgaccgcctcatggctctcattgcccctcgctcctctccagctgcgctggccctgacctgcctgccaagcaccctcctgccttgggcctttgcactcagtttcctctatctggaatgcttatttccagataaccacacagcaggccccatcgccttgttcgagtctttgcttatccatcagtgagacccacactgaacacagcatttaaaattgcatatgatttacatatggtatctcagagtctgtttatttagactctgtctctcccaactagaatgtcaattccactgacggacactcagagtagtagaaaatggttaatacatgtttattaactgactgaatagacggatggatggatgggtgggtggatgcatagatgaatgtatgtatgtgtgactgtaggtgtgcgtgtgcatgtatgactggaagcatggatgagtgtatgtatgtgtatatatgagtgtctgtgtgtatgatgggatggatacatgtatatatgtgtgtttgcatgaacgcacataggtatgattagatagatgatgaatgtatgcatgcatgatatatgtatacgtggtgtatgtgcacatgtatgt[137 bp omitted]tgcctcagcctcctgtgtagctgggattacaggcgtgtgccaccacaccgggctaatttttgtatttttagtagagatggggtttcaccatgttggccaggctggtctcaaactcctgacctcaggcaatcctactgcctcggccttccagagcgctgggattacaggcgtgagccaccgcgcccggccggatgggtgtatttatgtatatatgagtgtatgcatgtatatatgattggactgataaataaaatgtgtgtgttagtatgattgtatataggtatgactggatggattaatgtatatgtatgcatgatgtatgtgtgtatgatgtatgggtgtataattgtatatttgtatgtttgtataatcagatggatggatgaacatgcatatgatgtatgtatgattagatagatccattaatgcatgtatgatgtatgtgtgtatgacctatgtttatataattatatgtataagatggatgaatctatgtatgatgtatgtgtgtacaattgtatgtatcatcagatggataagtctatgtatgatgtatgtatgatcagatggactggtgaatgtgtgtatgacatatatatgtgtgaggtatgtatatatgatcagatggatgtctacataatgtatgtgtgtatggtgtatgtatgtataattgtatgcgtgtatgtttgtatgctgtaggtatgatgttacatatatgtgcatacacacgtgtgtatgattggaaggataaatgaaatatgtatgtttgtgtgattgtatgcacatatgattagatagattagtgtgtagctatgtatgctgtatgtgtgtacaatgtatgtgcctataattgtatgtttgtatgtctgtatgatcagatggatgaatatgtatatgatgtatgtatgatcagatagctggataaatgtatgcatgatgcatgtgtgtatggtgtatgcatgtataattgtatgtatgtttgcattagatggataaatgcctgtaggtatcatgtatgtacgcatacatgcatgattggatgactggatgggtttatttgtgtatatatgagtgtacgcatgtatatataattagatggataaatgaaatgtgtgtctgcatgattgtatgtatggattaatgtgtatatatgtatgatgtatgtgtgtacaatgtatgtatgtataattgtatgtttgtatgatcagatggatggatgaatgtgtatgatgtatatatgtatgatcagatggctccattaatgcatgtatgatgtatgcgtgtatgatgcatgtacacttgcatgtatgatcagatgagccagtgaatgtatgtatgatgtatatgtgtatgatgtatgtatgtatgatcagatagatgggtaaacgtatgcatgatgtatgtgcgtatggtgtatgtatgtataattgtatgtgtgcatgtttgtattagatgggtggatgaatatgtgtatgatgtatgtatgatcatatagatgggtaaatgcaggcatgatgtatgtgtgtatggtgtatgtatgtataattgtatgtgtgcatgtttgtattagatggatggatgaaaatgtgtatgatgtacgtatgatcatatagatgggtaaatgtatgcatgatatatgtgcgtatggtgtatatatgtataactgtacgtgtgcatgtttgtattagatgggtggatgaatatgtgtatgatgtatgtatgatcatatcgatgggtaaatgcaggcatgatgtatgtgcgtatggtgtatgcatgtataattgtacgtgtgcatgtttgcattagacggatgggatgaatgcacatgggtatgatgtatgcatgtgttcatgcacacatgcaggtatgattggatggatagatggatggatgggtgaatagacgccccacagctggatgcaaagtagacagatgtgaacccagcacctctcaccaataagtgtcctcatccccgggcaccctgcggctctcctgggcctcttccccacttacccacccccatctccgctcttatcccccaggtttggttcaagaaccggagggctaaatgcaggcagcagcgacagcagcagaaacagcagcagcagcccccagggggccaggccaaggcccggcctgccaagaggaaggcgggcacgtccccaagaccctccacagatgtgtgtccagaccctctgggcatctcagattcctacagtccccctctgcccggcccctcaggctccccaaccacggcagtggccactgtgtccatctggagcccagcctcagagtcccctttgcctgaggcgcagcgggctgggctggtggcctcagggccgtctctgacctccgccccctatgccatgacctacgccccggcctccgctttctgctcttccccctccgcctatgggtctccgagctcctatttcagcggcctagacccctacctttctcccatggtgccccagctagggggcccggctcttagccccctctctggcccctccgtgggaccttccctggcccagtcccccacctccctatcaggccagagctatggcgcctacagccccgtggatagcttggaattcaaggaccccacgggcacctggaaattcacctacaatcccatggaccctctggactacaaggatcagagtgcctggaagtttcagatcttgtagaggacgcagtctccatctctctccatcgggcctcgggaccctttctcttctgaatctgcttccctgcagtttagatcccgggatggcattcctgagaaagcaacccgaaccagctgtccttctgacagctcggtgttcagcttacagagaccacccctttcctccacagggagaggctcctccctctcctgggacagctcacaggtcctagtgattctctcaaccctaacaccgtctggcacgattgtgaccgctgaagtacaccacgagctccaggcttcagaaagtggtgctgagaacttgctccaagaagaagtcaaaccaaacttgcagttgatttggggtcatgtttaggtcagaatcaccgtgcccttgaacaagcaggtaggggggcttgataacttaactttccacgtggacagaatttttttttttgttttgtttttgttttgcagacacagtctagctctgtcgcccaggctggagtgcagtggcacgatctcagctcactgcaagctctacctcccgggttcacgccattctcctgcctc[177 bp omitted]cccggcccttttttttttttttttttttaattgagacggagtctcactcttttgcttaggctggagtgcagtggtgtgatctcagctcactgactgcaacctccacctcccgggttgaagcgttgctcctgcctcaatctcccaattagctgggattacaggtgtgctccatcatgcccggctaatttttctattattagtagagacagggtttt[133 bp omitted]tagggacctttctagaaattccaaagacagactttaagaagccccgtcgggaaaccttaggccaatgatgtggttacattaaaaataaattatctgggaatttcacagacttcacaaatgtcaggcttacatggtaggtttaggggaccgtttgagagacaaagatctacattcatatatgtagctatacatatatgtactttttcttcttagtttctttttaaagacattttatcactcattcgctcattagcacattgggaatgtgtgtatttggtagggaaatgaaaggcaccttgcctgttccatctctactccttttttcttttgttttaggattttctaaaggtgagacactggtggaactggggtagctgcttgggacgtaccacctatagttgtggctatttcacagagaagcagcagctagacagactcccatctgtaaataaacaagagataggaagagggggaaatagatttggaggaggcagccctacatttcaaacatacattcccttttttagatttttttttttttttttttggttttcagttttgatggtgggattggaaaatagagcttggcttgaggacattttcctggggtggcaccattatttcttgaaatagaatcttacttatggtgacactggcaagcacttgtgagaacctgaagacggattgaggtcatttgatgctcagaagttgggtgctgggtccctgccttctcagtccgagttctcctttcatttttgggtggggaggcgggttccaagagcccttcattggtggagttcacaaggcaaggtgtaaaaaaaaaagtagggcaggaagacagtggtgtgctggcagaggtctaacaatgggctctccaaggaagaggaaaaggttggttgtggagtgtttgtcagtttccgtggtgtaaatactcccaccacggctgacttcaagctagcaaccggaggtcactgaactaagagttgggaagagatagggcacaatatatgcttacgagttggtacacaccgtcagcagcagccagggtcaggagaaaggcgagatgtgaagagaggccgggaggtatcagatgacgtttccagcactagaccagaagaggtgcacacagcctagaccccctgaggggtacaccctgatctctagagcccacaaagaggtttttattcaacataaaacgtgttcatctctca[159 bp omitted]tctactaataatacaaaaattagccgggcatggtggcacgcgcctgtaatcccagctactcgggaggctgaggcaggagaattgctggaacccgggaggcggaggttgaagagagcagagattgtgccactgtgctctagcctgggtcacaagagcgaaactccgtctcaataataacaacaacaaaaataacccaggagtggctcaagagtccagtgtgggatgaaaatataaacagaggaagacaacatatgtcactggggaggctgggggagctagacaaaattcacacgggaggggcagggatgagacaatattgtgccctgggtctgtgcaaacgttgggaccagaatccactataagtttcattcttcggagacacggaagctctgcactggaggccgggactcaggcgtggaagagaatcttctccttattcaccggggaggctgtgtcttgtgcaaacaagtcatagaaacttgatgggagttggggagggactgaaggatgcatgcaaggttctgggaaggagtgagaagtagtgaaggccaaggggcccccatcacaggccgatggggtaagacttcgagagagcctgatcctggggtcttctgagactccaccaggagccggagagggcagggagccaaatccagctaggaggttacagattgcttttcctgggctgggctcctgagtgttggttcttccagctgtgcacaggggatttcaaacgttctacgtcctaaagccaggaagagtgacaaggcaggtggggacagaaggaagaagccaggagcctccctgagaaggtgtcaccttatctgtcctcctcttccccacacactggcctctgggtcccccttctctgtccacccacagagtgaaaccaattaaaatgttggatctcatttaaagtctgggtgattctttagtttccgtgttttctccaggaggggcaggtagaaacaggaactactctgttccttctgtctgtggggcctgggtccctccatgtgtttcctgtctcatcaccctcctttccttgacatctctctaaagccaatttatgaaggatcaggggctgggtgcagtggctcacgcatgtaatccagtgctctgagaagctgaggagggaagattgattaaggccaggagtttgagaccagcccaggcaacatagcgagatctctgtctctacaaaaaattaaaaaaatcaaccgggtgtggtgatgtgtgcctgtggtcccagctactcgggaggctgagatgagaggatcggttgagcccaggagtttgaggctgcagggagctatgattgcaccactgcactccagcctgggtgatgcaacaagagaccctgtctccaaaaacaaaaaataaaaaaaaaaaaaaaagaaggaggaggaggaacaggggtccccagggccagccccagccccacccatctgtaaccttccaatgcccctcccgaaaaaacaggggggtgacgagaatgctccctgcctcagtggcaggatgtgaagcttaacgccagcatttagagccacgcgcagcctctggcccgccttccctctcagcatccagccttctgcagcttcagctcttccacccctttgctttccatctcttcccccggatgcttttcagtttctcaatctcacccttgctctgtcatctcttctcctctctctctttccattcttcctcttgcctttcagactcccagctcctcatttcatttggatggattttcacctttttctttctttccttccctcttgtctctttttctttgctgcttacttttttctgactttctttctttctttctttttttttttgagacagggtctccctctctcacccaggctcaagtgcagcagcgtgatcttgaatccctccagcctctgcctcttgggttcaagcgatcctgttgtatcagcctcccgagtagctgggactacaggtgcctgccactacacctggctaattttcgtatttttagtagagacaaggttttgccatgcagcccaggctggtgtcaaactcctgggctcaagcaatccacctgtctcggcctctcaaagtgctgggattataggtgtgaaccaccatgactggcccacctctgagttcttgtttttccagctctaggtcatttttttttttttttttggagacagtgtctcgctctgtcacctaggctagagtgcagtggctcgatctcagctcactgcaacctctgcctcctgggctcaagcgattctcctgcctcagcttcccaagtagctgagacttacaggcgtccaccaccacgcctggctaatttttgtattttttagtagagacgaagtttcaccatgtttgccaggctggtctcaaactcctgacctcaagtgatccacccccctcagcctctgcaagtgctgggattataggcctgagccaccgctcctggcctctaggtcatctctctctgcctgtattcctctcagttgctgaatcccaggttaagatttttgttgggggatgactgggagttatatacaggagggagggtcaggcagacttgctgtccgagcttggcttagcctcttctggtcgtctgacctcgggtgattcatttctcccagcctcaatttccccacctgtagcatggagcatctaaggagacccatctcaagagaacaaaatgatgttattctattaattatggacctgaagccgggtccagggtaagagctcaataaatatttatctattttgtggtaaaatacacatactataaaatgtaccacttttcccattgcatgattcttaattcattttttccattttaagttacttaattcagtggcattaagtacattcacagaagaagccagacacaaagaccatatattgtattatcctaattatatgaaatattcagaataggcaaatccagccaggcacagtggctcatgcctgtaatcccagcattttgagaggctgaggtgggtggatcacttgaggccaggagtttgagaccagcctggccaacatggtgaaactccatctctactaaaatacaaaaattagctgggtgtggtggtgtgtggctgtaacccaaggtactcgggaggccgaggcaggagaatcacttgaacctgagaggtggaggttgcagtgagctgagatcgcagcactgcactccagcctggcagcctgggcaacagagtgagactctggctcaaaaaaaaaaaaaaaaaaagaaaaggcaaatccgtagagacagaaaacgtagtggctgccaggggctggggtgaggggtgctgtgtggtggaatggggagtgactgcttaatgaatatggggtttccttttgggatgacgaaaatgttctggagcaatatagtgaccttacaattctgctctgaagtatatgccgcaaagaacggaaagcaggtgttcagacaaaaacttgtacgctcaaatttatagcaggatgattcacaatggccaaaagatgaagcaattcaaatgtctgtccacagaaacaaatgaggtctacccatgcaagggaatattgctcagccatgaaaaggaagaagcactgataaacacaacttggatgaccttgaaatcatcatgctaaatatttatctttctttttttttttttttttgagacagagtctcactctgtcaccaggctagagtgcagtggcgcgatctcggctcactgcaacctccacctcccaggttcaagcaattctcctgcctcagcctcccgagtagctgggactacaggcatgcaccaccacgcccagctaatttttgtgttttttagtggagacggggtttcaccatgttggccaggatggtctccatctcttgacctcctgatccacccgcctcaacctcccaaagtgctgggattacaggtgtgagccaccacgcccggctgctaaacgtttatcttaacctattattattattattttgagatggagtcttgctgtgctgcccaggctggagtgcagtggcgcgatctctgctcactgcaacctctgcctcccaggttcaagtgattctcctgtctc[134 bp omitted]acttatgctattcctggcagctttagtcataatggccccaagctgaaaactatccagacgtccatcagcaggtgaaggcagaaacaaaccctgatgcatccatacaaaaggataccctgagccaggcacgatggctcacacctgtaatcccagtactttgggaggcctaggtgggcggatcgcttgaggtcaggagttcgagaccagcctggccagcatggaaaaaccctgtctctactaaaaacacaaaaattagctgagcgtggtggcacgtgcctgtaatcccagctacttgggaggctgaggcataagaatcgcttgaacccaggaggcagatattgcagtgagctgagattgcgcaactacactccagcctgggcggcagagcaagactctgtctcaaaaaaaaaaaaaaaaaagatattcctcactgatgaaaaggaatgaactcccagtagtcaataccccaggaaaagaaactagggctgggcacagtgattcacacctgaaactccagcactttggaagactgaggtggaaggattgcttgagctcaggagttcaagaccagcctgggcaacagagtgagaccccatgtctttaaaaaaaaaaaaaaaaaaaagaaagacagacaattaaatccaggctgggcacggtggctcacccctgtaaccccagcactttgggaggccgaggtgggaggaggatcgctttagcctgggagttccagaccagcctgggcaacatagtgagaccgtgtctctactaaaaaaattcaaaaaattagctgggtatggtggcacatgcctatagacccagctacttggggtgctaaggtgggaggatcgcttgagcccctgaagttgggactggagtgagctgagattgcaccaatgtactccagcctgggcaacagagtgagaccctgtctaaaaaaaaaaaaaaaaagaaagaaacgaaaccagaaacaaagaagcaaatactgctgaaataaataaataaaaataaaattttttaaaaaagaagcaaatattgtacaattccatgcctatgagattctagaaaagataaaacttatacagggcagagagcagatagtgcttgccaggacctagggagcagctggtgagatttactgcaaaggaacaaatgaggatcttttgggggtgctagaaatgtgccctatcttgattatggtgatggttctgggactgtatataattccccaaacttataacaccctagaaaacaaatgtatttcaataagagagtgaacagggagtcaggtaggctgggtgcggtggctcatgcctgtaatcccagcacattgggaggccgaggagggcggatcacctgaggtcagaagttcgagaccagcctggacaacatggtgaaaccccgtctctactaaaaatataaaaattagctggatgtggtcacgggtgtctgtaatcccagctacttggagggcagaggtgggagaatcacttgaacctgggaggcagaggttgcagtgagccgagaatgtgccactgcactccagcctgggcgacactgagactcttatctcaaaaaaaaaaaaaaaaaaaaaaaaaaaagagagttggggaaaaaacagaatggattttataggacataaattataccttagtaaatcagaaggaaaagaaaataaaattattgagcaggcagtggtgtaagccggttctaactcttttaatcctcagaatgatactatttttatgatccctatttcacagatgaggaaactgaggcagagggcggctgggtgacctgcccaaggtcccaagctaggaggggatggacccagtcttgatattcatcttgtcaggtggccagcctccttgctggtctctgtcccctccattttctgtccttcattttattcctgttctcgaatttttatttatgcatttgtagagatggggtcttgctatgttgcccagtctggctttgaactcctgggctgtaaatgatcctcctgcctcggcctctcaaagcgctgggattacaggggcaagccactgcgcctgaccgccactcgtgttctcttctctcttgttttccccttcctaggtctcaacggtgagtgattctctcccctcgttccctctctccgtctcttccctcacccccgtatgtgtctgtccctcctggtctccaaacaccctcccttcccccagctgtttcctctgcccctgaccaggactaatttagcaaatgctccaatcctcttatggcaacagcccagcctcagcagaatggcaggggaattagcgaggattaggttcagacgcatgacccgtgggggaggggactttggggagttttaacgaaacgatgccccctcctcctcccctcctatcccctccatggaaaagcactcgtgcctggggcacacaatgatgataaaatcacggctaaacccttcacggtgcgcctcctatgtgccaggcactgttaagccccttcactcattgaaacgtcggtgcagctccctgagggaggggccgtgcccctccctggatttaaggatcaggagaggttaattaactttcctgaggcaaatgggatccaatctcagccttcttggtgcttctcaggttaaagatgaaaaaacactggagggaagtaaactgaatgggcctgggggtcacaccgcaagggggcgcagcttctgtttgggtaacttcgggacgattttttatttatttattttttttgagacggagtcttgctctgtaatggcgaaatcctgcaacttccgcctcccgggttaaagcgattctcttgcctcagcctaccgagtagctgggattacaggtgtctgccaccacgcccggctaatttttgtattttttagtagagacggggttttgccatgttggccacgctgatctcgaactcttgacctcaggtgatccacccgccttggcctcccaaagttttagcctccgtaaagtgtggaagagagaagagagagagagagagagagagagagagagagagagagagagagagagagagagaaagaaaatgcatttcagaggagaaacggaaagcagggtggaggaagagattaggtgggaacagaacagacaaaacagacgccaggaggagctgaaggacgttatccaccggccacattcatacctcactgtgcaatttgcaatacaaaggacaccatgggaatccagctcctgacatgcacctggggcgctgggaaagacaatgactgtgagggagggataattaaggacagagtgaggggacgggtgggcacggaggccgacacctgtcatctcagcactttgggaggccaggcaggaggatcgcttgaggccaggagtctgaagctgcagtgagtcatgatcgcgccactgccctccagcctgtgcgacagagcgagatcctgcatctaaaaaaataacaaaaaacctcactgtcaacagagtaaagaggcaagtcacagaataggagaaaacatttggaaatcacacattttttaagggattgataatcagaatatacccactcctaaaactcaacagtaaaaaaaacaaaaaaccctgatttaaaaatgggcaaaggacttgaactgacagtgctccgagaagatatataaatggtgaataaacactcaacagtctggccaggcacggtggctcaagcctgtaatcccagcactctgggaggctgaggcgggcagatcacttgaggccaggagtttgagaccagcttggccaacagggtgaaaacccgtctctactaaaaatacaaaaattagccaggcacggtggcgggcacctgtaatcccagctacttggagggctgaggtgggagaatcgcttgaacctgggaggcggaggttgcagtgagacgagactgcaccactgcactcctgcctaggtgacagagcaagactctgtccccctccccacccccaacccctggcaaaaacaaacaaacaaacaacaacatcaacaacaaaaacacacacaaaaaaagacagaccatgccaagttttggtgaggatatggagtaactgaaaatgtaaactggtaaaaccgatttggaaatctgttcagcgttatctataaaatttgaacaaatggcttctctgtgaccccaaaattctacttctagtattgtactaacagaaatgcatacatggctgggtgcggtggctcacgcctgtaatcccaacactttgggaggctgaggagagtggattgcttgagtccaggagtttgagaccaacctgagcgacatagggagagcttatctcaaaaaaaagagagagagagagaaagggagggagggaaggaaggaaggaaggacacacctgtgtaatcactacccagagtgagaaacagaatattcccagcaacaccaagctgtatgagccgtgactgcaccactacacttggtttgtgaagtttcctcaaccaatgttttacttcagtgcccctataggtgggccagaaaggagacattttccagagaaaacctgaggcccagagcagtagaggaaaaagcggctattttctatgaatttgggaaaaagaaactccattcccaagacaaagggaatgtggtctagagagatcagagaaaggaaccaattttctaaaaacaggatagaccttattttattttattacttttttttttttagatggagtctcattctgttaccaaggctggagtgcagtggcacgatcaggactcactacaacctctgcctcctgggttcaagtgattcccctccctcagccacccaagtagctgggactacaggtgcacgtcaccacgtgtagctaatttttgtatttttagcgcagacaggatttcgccttgttggccaggctggtctcaaactcctgacctcaagcgatccgcccaccttggcctcccaaagtgctgggattacaggcatgagccactgcgcctggcctattttacttatattttgcatcgttaaaaaccctgcaccgtggggaattcacagtgcatgccatgaaaattgtccccagccccatggcggcccttccatggggctaccattctcagcagcttcctgtgtgtcacccttcatgcctgctgtgcatttgggagcaaaactgcctatgtcttgttttccaatttctacactttcatattatgtttatttttatttttatttttttgagacagagtctcgctctgtcacccaggctggagggcaatggcgtggtctcggctcactgcaacctctgcctctcgggttcaagagatcctcctgcctcagcctcctgagtagttgggattacaggcgtgtgccaccacacccggctaatttttgtatttttagtagagacggggtttcgccatgttggccaggctggtctcaaactcctgacctcaggtgatctgccctcctcggcctcccaaagtgctggtatcacaggcgtgagccactgcacccggctcagtttctacactttcttatctctttactttgttcctcaagcatggttcaagaaacttctgtgctttctatttttatttttttaattttttgagacaggttcttgctgagttgccctggctggagtgcagtgatgccaccacagcttactgcagccttgacctcccacactcaaatggtcctcccacctcagcctcccgagtagctgggactataggcatgcaccaccacgcccggctaatttttgtgtttctggtagagatggggtctcactttgttgcccaggctggtctcaaactcctgggctcaagcgatccccacaaccccctgcctcagcctcccaaagtgctgggattacaggtgtgaggcattgcgcctggcctccctttctttcttttccttcttttctttctcttctcttttcttctctttctttctctctctgtttctttcttttactttctttctctctctcccttccttccttccttccatccttcctttctctctccctctctttctttctttctttttttaaatagagtctcattctgtcacttaggctggaatgcaatggcacgatctcagctcactgccacctccgcctcccacgttcaagtgattctcctgcctcagcctcccgagtagctgagattacaggcacctgctacccacgccagactaatttttgtatttttagtagagatggggtttcaccatgttggccgggctggtctcaaactcctgaccttgtgatctgcctgccttggcctcccaaagtgttgggattacaggcgttagctaccgtgcctgtcttcctatttttttttcttctccccgctgcgcccccccgcgacgcccggcttcccaagctcatgatgtcttcctacttctgcacctctctcttattttgttttctgggaataacatttgagctcctccaaggtctgatgccatccggccctggctcaagtctccatccttcctgccctggcttgccgccctcttcctgtccctaaacaaggcaagctctgagacagaggccaggtgtggggctgaggtggatagagaggcttgccgctgagctgaccatagccactctcaaagtgtggttcctgctgcttctcagtggcgtcagcatcacctgctaatcagaaactgaaattctaggggtgagacccagggatctgggttttaaggagctcttcaggggattctaatgccaactagaccttgaaaattgctggcttatggctgggcgcagtggctcattcctgtaaccccagcactttgggaggctgaggtgggcagatcacctgaggtcaggagtttgagaccagcttggccaatgtggtgaaatcctatctctactaaaaatacaaaaatttgccaggcatggtggtggccgcctgtaatcccaggtactcgggaggctaaggcaggagaatggcttgaactcaggaggcggaagttgcagtgagctgagattgcgccactgcactccagcctgggcaagagagggagactctgtctcaaaaaaccaagaaacagaaaacaaaaaattaaaaaagaagattgctggcttaaacttggtgcattggtgggggctggggaggaggctggttttcaaggtaataacgtttgatcagtatctcttgcagggaggaggtgaggtgaggcagggccactagtgacattgccctggggacaaacttgcagggactggggaggattctccaaaccaggggagccaggggagggattagggagagttctctgttccaggtcccctcctgagcagatgtcatgataagagatgcctgaatccacccaggcccattgtataggtggggaaactgatcctggagggaggaaggcttttgcccaaggtcagacagctgataatgatgaggacctccagggcttcccagctgctctgagacactgtgcccagaatgttcagtacaagggagttggtgaaatatcagaaagagaaaagcagcccccaatggccaggggctggccttgcactcacagccaggcctccatgctctctctttggatagaagggacttcaggccgggtgtggtggctcatgcctgtaatcccagtacgttgggaggctgaggcgtgcggatcacctgaggctgggagttcgagaccagcctggccaacatggcgaaaccccatctctactaaaaatacaaaaattagccgggcgtggtggcgggtgcgtgtaatcccagctactcgggaggctgaggcaggagaatcgcttgaacccaggagacagaggttgcagtgagccaagatcgcaccactggactccagcctgggtgacaagagtgaaactccatctcaataaataaataaataagtaaacagataaacattattaaaaagagaggatttcataaaacacaatgcatggtgcaagaactggatttaaacaaagaaacaaggacaaacggacaaggttattctttgtgttgccctgagctctctgtaatcatgtctgaacccagagagttcaaaccacaaaaacatgttgttcaaaccacaaaagagatccgtgtcctcctattctgtcgaatacaagtgacactgtttctagacaaaaaccctagttctgggcactcctcatcctcctcactttcaaggtaagagaatcagagtgaccctcttttcctgacagcatcgaacccagagcaaaaccacttttcttatttgttaaaactgcagtaaaataggcataacatacaa[133 bp omitted]ctgcctcagcctcccgagtagctgggattacaggtgcccgccaccacgcctggctaatttttgtatttttagtagagacggagtttcaccatgt[132 bp omitted]tcattctccccatccccagcccttgggaacctctaacttattttctgtctctatgaatttgtctatgttagatatttcttgggagtggactcatacaatatttgtcctggcttatttcatttagcataaatactctctaggttcatggaggttgtagcctgtgccagaacttctttcttaaggctgaagaatattccattgcatggatagaccacattttgttcattcatttgatagacatttgggttgtttcagccttttggctattgtaaaagatgctgctatgaacattagtgcacaaatatttgttcacttccctgatttaaattcttttttttttcctgtttttaaacattttttttagtttgcattcttttaggtataaaagtcactctgttttgaatcctttccaaaattatcaaacaagctcaaatcctataacatttgccattaaaagcaagggcagccgggcgcggtggctcatgcctgtaatcccagcaccttgggaggccaaggtgggcggatcacttgaggtcaggagtttgaaaccagcctagtcaatatggcaaaaccccatctctactaaaaatacaaaaattagcttggtgtggtggtgggcgcctgtaatcccagctactcgggaggctgaggtaggagaatcgcttgaatccgggaggcagaggctgcaatgagccaagatcgcgccggcaacagagccagacaccgtctcaaaaaaaaaaaaaaaaaaaaaaagcaagggcaaaagccacaattcctttcacatcaatctaaaacatcctttcaaacaccctcttactgagaggccccaaaggttccctttgtgttcctccttcttgcaacaagacaataaacccaactttgcttgactactggtgtccctctgatggtcttcagctgatcaacattgacaggtttcaccaagtcagtcttaaaaaccaaccacctgggcatggtggttcacacttacaatcccagcaatttgggaggttgaggcaggaggatcgcctgagcctgggagctggagatcaggctgggcaacagagcaaaaccctgtctctacaaaaaataaaagaaattagccgggcatggtggtgggtgcctgtagtcccagcaacttgggaggctgaggtgggaggattgcttgagcccatgaggtcaaggctgcagtgaccttgacctgttgccactgtactccagtctgggcaacagagcaggaccctgtctcaaaaccaaaaatacaaaacaaaaacaaaaacaaacaacaacctatgctccaaaaccatttctggggaaataatcagattccctacccgttcacctacgaagcccagctagagtctctcgtcttaatctttgccaatcgaatacacaaagttttttttttttttttttcacagagtctcgaattgtcgcctgggctggagtgcaatgctgtgatctccactcactgcaagctctgcctcctgggttcaagcaactctcctgcctctgcctcccaagtagctggggttacaggcgcccgccaccacgcccagctaatttttttgtatttttttgtagagatggggtttcactatgttggccaggctggtctcaaactcctgacctcttgatccgcccgcctcagcctcccaaagtgctgggattacaatcacgagccaccacgcctggcctcaaatatgcaaagttttacatttaatttattttagaaattatagagagggggaccatctactcacatcttatagaccaagaaaactgtgagatcattcctgttgacagcagggccatcatctgctttggtgaataatgtgttcccagccacctaaaagccgaacaaaatgtgcaattatggtaaaatgtttccagaaaggaagcagaatatagatacaatgatggaagaatgccacagtgagatactaagcaaccttttaagagcgtgcagggaacttgtaaacataccatctatttgttttataatttatttatttatctatttccaagacagggtctctactctgtcgcccaggctggagtgcagtggtttgatcatggctcactgcagcctcgaattcctgggctcaagcgatccacccccctcagcagcccaagtagctgggactacaggtgcataccaccacacctggctagttttttgtttttttttaaaatatattttgtagcgataaggtctcgctatgttgcccaggctggtctcgaactcctggcctcaagtgatcttccccccttgactcccaaagccctgggattacatgcatgagccaccatgcccagccactatttgttttgtttcagtttatatttatttatttatttattttgagacagagtttcactattgttacccaggctggggtgcaatggcacgatcttggctcatcacaacctccacctcctgggttcaagcaattctcctgcctcagcctcccgagtagctgggattacaggcatgtgccaccatgcccagctaattttgtatatttagtagagatggggtttgtctatgttggtcaggctggtctcgaactccctacctcaggtgatccacccacctcggccttccaaagtgctgggattacaagcgtgagccactgcgcccggcagaactttcttatatttaaatgtctatcttcacaaaatagtaccagtgagcttgttcatctgcttatgtctttattggccaaataaatagccacggtgcaaaatctctgtggtcactactgtgttcccagcatgtcctgtagatgaagccggacaatgtgtgcaatgaggaatcattgctggggatgctgctttctacaatagaactctaagtagcaggtgaaaacaatgagcgaggcccgtggtaacaatgtctacgttttattgaattttgaaattggttgcatgagtcatttctttttctttttttttgggagggggccggagtctccctctgtcacccaggctgcactgcaacctctgcctctcaggttcaagtgattctcttgtctcaacctcccaagtagctgggattacaggtgcctgccaccaggcccggctattctttttgtagttttagtagagacggcgttctgccatgttagccaggctggtctcaaactcctgacctcaggcgatctgcccgcctcggcctcccaaagtgctaggattacaggcgtgagtcaccgcgcccagccttgcatgagtcatttttagctccctggatcatgagccttgtcaatctccttgacccctgaacccatgtgggtcctgctatgaggagatgagggcagccaggggtctgacacagcagatgcatctctgagggacctgacttgtgtgaaccaaggtaatgggtcccctgcatacatcagtagcagtccatggaaatgtccatcagacctgtgtcccctcctggttgggggagcaggaaacttcaagaatgactagtaggggccagagtggcctcaaaggaccaaagaggaggctgtggggtcatccaggagagagggatggtgactggacaaggcgggcagcccgggagccgggaggagtgggtagactcgctggcattgatcatgtggggccccagccctgggaaggaataaggatgactcctgggggctggctggcggtgcctctcctgagatggggaccccaaccacaggtcatgatgttgactcccccgatcccatgtggaataccacctcgcctgggctagggcccatgagggtgaaaccaaggctgtgttgtccactgaggttccccagctcctagcacagctcagcaggcagtacctgatcagtgatgagggattaatccaccattcaactcctccagggggcgggactgcagggcagggtgggaaacggagggtcctggcagggtgggccagggtgggcacagcagagaagtgatttaagagccaagcccttgtcagtacacacttgtgtttgggaacagatcaggactcaggatgcaagaccctggtcatctccaaggtgagcagggacagaggtgtgaggggcctgggctgatcctgtggctgaggctgcagagtgcaaatctgggcagccagagaagggctgggcctgtgcgggcggcttcctgtcctgcagacgggggagaacttagtggtgtctgggaaatgaaaaatcatgcagctgggcgcagagtctcacgcctgtgatcccagctctttgggaagccaaggtgggaggatcacttgagcccgggactctgaaaccagccgagccaacatagtggagacccgtctttagcaaaaatacaaaaattacccaggggtcgtggtgcacacctgtggtcccagctactcgggagactaaggcggggggttccttgagcccaggaagtggaggctgacttgagccgtgatcacatcactgcactccagcctgggtgacagagcgagatcccctccaagaaaaagaaagaaggaaagaaattaaaccatgcagttgagtggagcagaggactgggcaggtggcggctcccctgcaagtgtcagggtccctataacccttggatgggaggggacggggcagctggggagggctgagcaggcctgaggcagccccgtctgctccgaggtgaggcgcctacgctgcctgccttcccaggagctgttatcgcgcccatttcctagatgtggaccctgaggcccagagaggtgcaaggtctggtctggataccaggctgctatccgcggtgccgccccagcccacactgcctgggctcctggcctggcgcaggggacggggtccctaggggggctgggggctgcctgggggtttctgtgacctgtttccctcccacccccaggccctcccctggccctggaccctccaaggagacagcggcaggagcgcacggtctacactgaaagccagcagaaagtgctagaattttactttcagaaggaccagtacccgaactacgaccagcgactgaatctggcggagatgctcagcctcagggagcaacagctgcaggtctgacccccacccccaccccgcccgccccagtcaccccaaggagcctccccaccgctgtcactcaccggggcctggcccgcccgaccacctcccgccctgccacgcaaggggtcccgccagtgtagacccgggctgcatcctgagtcctgttccaactctatgctagcccaaactcgcccacatgatcggcccaggctgtcccccacggggtctcccggtgcccggacctcaggcacccgtgagaacccgcggtccctcccctggaaccctccctggccccccgggcacctgggcggcagacccggctcctcccctcccaccccaccctcctccccctactttcccctccctcttccctcccttctccaggcctgggagccgggggccctcatatggtgggtgcggggtgggggtgaacaccgggagagttttgaggccggcgccgcccccgagcggctcacccgggccgcgcgagtccctccttcacaccttctccctgtcccctctgccccccaggtgtggttcaagaatcgccgcgccaaactagctcgggagcggcggctccagcagcagccccagcgcgtccctgggcagagaggccgaggagcccgcgctgcgcccctagtccctgtagccgctgcctccttccctgggggtcctgagttcccgcagggcaggggttcctggatctcccctcagccgggcccctggggagtcctcccagcagcagaaccgaagatctacagcctcccccggacctggggtggccctgagtgtggaacacaggagggcctcaaggctgtcccggctccaggccctggcccaatcccagcccctatcccaggcccagcccagatcccaggcccagtcccaggcccagccccgaatttaggcccaatgtcaggcccactgtcagtctcgatccccggtccaataccagcccccatctcttgcccaggcccaatcccagacccagtcctaggccgaaccctgatgccaggcccaggatcactcccaaccccagccccaggcgccttgtggcctcagagcccctatgcctccaacttgtcgccagacacccagttataccctgacttcaccaagctgctcccgctcctagaccggttcgaggaatcctcactctccaccacgacgtctcagtacaaagaggaggatggcttcgtggacaaaaatcactcagtccccaggtcattactggatttatagggggcctgtgcctgcaaagttcttcagatcccagagggcctggagtggctgatctacactgctggtgactttctgcagtgaatgcatcaccctttacccaccctgctgcaggtggacatttgctgtcttcactgtgcagccatcacaggtggctctgctgtgaatgtgcctgcctgtcatttgaattgagcctgagcgtttctctgctgagactggagtcgctgctcactgggatgtttggcattagtggatgccgcttgagagctttgttaagggcttttcccagccctccttctggtcaatgtcctccccaacactgaggcttgtgagactttttaatgtttgtcgatccagtgacttgtggttttgttgtggttgtaatatccatttccctgatgattgagagattgagaaattctcatatgggtattaggcattttcaaatagtgactatttttcgtttttttttttgaatattttctcatttttattaaatagtgactattcatggtctttttggcccattttttgtagttgatttctttacaaatgtttataattttttttttttgagtcaaagccttgctctgccacccaggctatcgtgcagtggcacgatcttggctcactgcggcctctgcttcctgggttcaagtgattctctagagtctcagcctcctgagtagctgggactacaggtgcccaccaccgtgcctggctaattgttgtatttttagtagagatggggtttcatcatgttggccaggctggtcttgaactcctgacctcaaagtgttccgcctgcctcagcctcccaaagtgctgggattacaggtgtgagccactgtacccggccacgatgttttaaaataaaactccattgggagttaatattctgcgaggatctcctattatgtggttcgtcttcttgcttttgttaagtagatcactgtgcatagcattcaaaacattcatcagcagattcattcttcagtagaagaaaaaactcaatttaaaaatcagacttgatggacaaaaactgttataaaagtttattttttttttgagacagggtctcactctgtcatccatgctggagtgcagtggtgccatcttggctcactgcaacctccgcctcccacgttcaagtgattctcctacttcagcctcctgacttgctggaactacaggtgtgggccaccacacctggctaatttttgtattttttgtagagacaaggtttctccatgttgcccagacttgagctttcaagtttcttcaagaaaattgttggaattttaattggaatgacatgaaatttagaagtgtttttgggagaaattgaaatttttacaaagtctagtcgacctagtacttatttatattcattcaatcggtgttttac[140 bp omitted]ttgccccggcctcctgagtagctgggcttactgggattacagtagcacaccaccacgcccggctaatttttgtatttttagtagagatggggtttcaccatgttggccaggctggtcttgaactcctgacctcaggtgatccacccccgtcggcctcccaaagtgctgagattacaggcgcgagccaccgtgcctggctgaaatgttattatttaatcacagagctcttgcatgcatctttctgtagatttatttcttgcacttcatttttattattgtctgatattttacatggtattttaaatttcttattttaaaaaaatgtttgtcttgcacatagaattcagttgatctgtttattttgtttccaggaacctagttcaattcttttgaattctcataacttagctggacattgtaaatttaaaaatgaataaaacttcatggttactttgtggacattgattgctgctaagccgacgagtgcctctcctcagcactccacacccctctccgcgtctcgcttcctctgccgccccctagtggccatcctggccctgggtctccccacagcgggttctctgaccctgcctgtcctggtcccgtttagcaaatgctctaatcctcttaggccaggccagcctcagcaaagcagagagagaattagatcagatgttgggggaagggaggacggctgtgcgtgtgtgcgggggacagacttccaggatgtaatgaaagctcctccttatctagccgaccctggtagtaaaatacacacaaaaacaccggaacttcacaccagtcagactctgacagtgtgggaagagtagggaggaatctaatccatctattgtaggcgagggagcccctgtggacattctgggggcatgggggagaggtggtccagtctgactgtagattcagaatcacatcctgggcctaggggagggacggtggtgctccagggccctgcaggcatatcaatgaatggaaaatggattagtttattaatgaagatggaatttgcatgtgccctgattagctgaatagaaagtgaatggattaagtagaacagaattcctctctttttcatctcctcaattcttcttttttttggatacaggatttcactctgtcacccaggctggagttcagtgacgcgatgtcagctcactgcaacctctgcctccccggttcaagcgattctcctgccccagcctcccgaggagctgggattacaggtgcccgccaccacgcccggctaatttttatatttttagtagagatggggtttcactatgtttgccaggctggtctggaactcctgacctcaggtgatccacctacctcggcctcccaaagtgctgggattacaagcatgagtcaccaggccgggccacggattagtttgttaatgaatgaagatggagtttgcacatgccctgattagctgaacagaaagtgaatggattaagtagaacagaattcctctctttttaatctcctcaattcttcttgtttttggagacagggtctcgctctgttgcccaggctggactgcagtgatgcaatctcggctcactgcaacctccacctcccaggttcaggctattttcctgccttaccctccctagtagctgggattataggggctagccaccacgcccagctaatttttgtatttttagtagagatggggttttaccatgttggccaggctggtcttgaactcctgacctcagatgatccacccacctcagcctcccaaagtgttgggattacaggcatgagccactgctcctggcctcaattcttttttttttttttttttttggagacagggttttgctctgtcacccaggctggagtgcagtggtgtgatctcggttcactgcaacctccgcctcccagtttcaagcaattctcccacctcagcctcctgagtagctgggactacaggtgcatgccactgtgcctggctatttttttttttttttttttgataaagacagggtttctccatgttgctgaagctggtctcgaactcctgagctcaggcaatcctccagcccatgtctcccaaagtgctgggaccacaggcaggagccactgcccccggctatatcttctccattcaatttccctcctttttcacccaagcaagcagcccccttcactccctttggaaaccgaaaattccaagggaattttaccatctcctaggaagctctcccgcctctcctcatcatcccaggctgtgttctgggcatccccaagggaagcatctggacttctcactggaccaaggaagaggggacgaggtgacgttcagaaggcgggccttcgaaattccccatgtctgtcttggcaagagcaagaatttctcttgttttcctgcctgtagccaaaaagcataacaagaaaggattcagggtacgtatgagaacagttcattgtaccttcgacaaatgggtcaagttcaagctaatactgccctgcatgctccgggatggagatggaggcagtgcaggtagaaatgtcattgtcttgtaaggatcagagagagggggaaaagggccaattttttttttttttgtagagggagtctcactctgtctcccaggctggagtgcagtggctcgatcttggctcactgcaacctctgcctcccggattcaagcgattcccctgcatcagcctcctgagtagctgggactacaggcgcctgccaccaccaaacccagctaatttttttatttttatttttattttttgagatggagtctcgctctgtcacccaggctggagtgaagtggcgtaatctcggctcactgcaacctccacctcccgggttcacgccattctcctgtct[134 bp omitted]agcctcccaaagtgctgggattacaggcataagccaccaagcctggcatttttgtatattttgtagagacagggtttcaccatgttttccaggctggttttgaactcctgatctcatgtgatcctcctgcctcagcctctcaaagtgctgggattacaaagtgtgtgagccactgtgccaggccagaacctcttgctttaacaccctgcttcatcctaggtctctggatctagtttctgattttcttttttttttttcgagatggagttttgctctttttgcccaggctggagtgcaatggcacggtctaggctcactgcagcctccacctcctgggttgaagtgattctcctgcctcagcctcccgagtagcttggattacaggcgcctgccaccacgcccagctcattttttttttttgtaattttagtagagcagggtttcaccatgttggccagactggtctcgaactcc[133 bp omitted]caggctggtgtacagtggtgtgatcatagctcactgcaaccctgaactcttaggctcaagcagtcttctcatcccagcctccctagtggctgtgcctacagccatgtgccaccaagccaggctaatttttaatttttttcctgtagagatggggtcttgctatgttgcctgggttggtctcgaactcctgggctcaagctatcctcccatctagcttcctaaagcattgggattacaggtttgagccacagcacctggcctgccccatctcttaaaaaaaaaaaaaaatagtgaggttggtggggtggggcaccagtatgttttaaagctctgaggcaattccagtgtgcaaagcttgagtactgctgttctcagtcaaatccctgccatggagtagacagactcctgggagttgatgcctaactgtcattattaagaagacaccaaagccagctgtggtggctcatgcctggcatcccagcactttgggaggccgaggtgggtggatcacctaagttcaggagtttgagaccagcctggccaacatgatgaaaccccctctctactaaaaataaaaaaattagcagagcatgatggcgggtgcctgtaatcccagctactcaggaggctgaggcatgagaatcgcttgaactggggaggtggaggctgcagtgagccaagattgcgccactgcgctccagcctgggtgacagagcgagactgtctcaaaaacaaacaaacaaacaaacaaaactattttagtaaaagaaaactcaaaattgccttatctgattgtccctttcacagaaatccacctagataaaatcaaatgccataaagagaaagatgtgaatggtcattattttatttattatttatttatttatttttgagatggagttttgctgttgttgcccaggctggagtgcagtggcttgatcttggctcaccgcaacctccacctcccggttcaagtgattctcctgcctccgcctctcgagtagctgagattacaggcatgagccaccatgcccagctaatttttgtattttcagtagagacggggtttctccatgttggtcaggctggtctccaactcccgacctcaggttatctgcctgcctcggctcccaaagtgctgggattacaggcatgagccactgtgcccagcctgcgaatggtcattatttttataccaaataaatatagtagccaccagtaaattcattagttaaaaagggttttcagctgggcatggtggttcacgcctgcaatcccagcactttgggaggcctaggtgggtggattacgaggtcgggagatcaagaccatcctggctaacacggtgaaaccccgtctctactaaaaatgcaaaaaattagccaggcatggtggcgggcgcctgtagtcccagctacttgggaggctgaaggaggagaatggcgtgaacccgggaggtggaggttgcagtgagccgagattgtgccacttcactccagcctgggtgacagaaattctgtcttaaaaaaaaaaaagggttttcaaggccaggtaaggaggtggctcacgctttctaatctcgggaagccgaggtggaaggatggactgaacccagaagttcgagactggcctgggcaacatagtaagaccccgtctctacaaaaaattaaaaatttggccaggtgtggtggcactacctgtggtctcagctacttggaaggctgaggcaggagggaggatcacttgagcctgggaggtggaagctgcagtgagctgtggtggtagcactgcactccagactggatgacacagcaagaccccgtctcaaaaaaaatttttttccagactcccattttaacagactgtttctgccgggtgcagtggctcacgcctgtattcacaacactttcggaggccgaggagggtggatcacttaaggtcaggggtttgagaccagcctggccaacatggtgaaaacccgtctctactaaaaatacaaaaattagcctggcatggtggctggcgcctgtagtcccagttactcaggaggctgaggcaggaggatcgcttgaatccgggaggcagaggttgcaatgagctgagatcgtgccactgcactccagcttgtacgacagagcaagactccatctcaagaatatcccccaaaaacaacaaaaaacctcagactgcttccctgaaattcttctaaagaaaatgcctgacaggaaataacttaaggatattgtgggtttttattgttgctacttcgagatgcagttgtatctctagagacacagtggggtcagatcagagatggggttcattcaggggcacccccagaactgggagagtcctcggcttccacatacccgttatggtgctccgtggccaccagggggcaacaatacgtcactgttccagcccagggagcggccaaccagagcttggacctggggtgtcccaggagccacctagaccggctggttccttccatacaaaagacctccaggtgggatgggggagagacaccccacattcgagtgggagaaaaacatggaaaagacacagaggcaacattatatttctttccacttgtgtaatttaagctaaagccaaacagctagaaaatatactttttttttttttttttttggagacagtcttgctctgttgctcaggctggagtgcagtgataggatcataactcactgcaagctccgcctcccgggttcaagccattctcctgcctcagcctcccaagtagctgggactacaggcacccgccaccacgcctggctaatttttgtatttttagtagagacagggtttcaccatgttggccaggctggtctcaaactcctgagctcaagtgatccacctaccttggcctctcaaagtgctgggatcataggcgtgagccaccttacccggccttcttgttgtggttttaatttatatttctctagaggcaaatgatgcaaaacatcgtttcatgtgctgatttgccatccctgtgtcctctttggtgaaatgtttgttcaaatcttttattcttttttttcttttaaaagattatttgtttaatgctgggttttaggagttctttatgtattctagaaacaagtccattgccagatatgagatttacaagtacttcctctccatctctggtttgtcttcttgttttctcattttgttttgagatggagtctcactttgttgcccaggctggaatgtagtggcacaatctcggctcactgcaacctccgccaacacatctggctaatttttctatttttagtagagacagggttttaccatgttggccagacttgtcttgaactcctgagctcaagtgatccacctgcctcggcctccgaaagtgctgggattacaggcatgagccaccgcacctggcctatcttttcattctctttataggttctttggttcttttgcggaacaagactttagtttttttattttttatttttgagatggagtctccctctgttgcccaggctggagtgcaatggtatgatctcagctcactgcaacctccatctcctaggttcaagcaattctcatgcctcagcctcccgagtagctgggattacagacatgtgccatcatgcccagctaatttttgtatttttagtagagacagagtttcactatgttggccaggctggtctcaaactcctgacctcaagtgatccgccctccttggcctcccaaagtgctgggattacaggtgtgagccaccgcacctggccttatgaaagttttagaagcctccataaacaccgtttattgtatatggtttaacaacacagagtaagaggataaaattagattgcaaattacactccttaagatcagagcaataataaattgtggagatacatgtgatgaaaagaaatggaaccttaattgctcctgtaattttatttcttatttttattactaatttttgctctaaaatctgtcactgtagctatttcttatttttattaacaaacatttagacatccttttaggtagtacgtacattattcttgtagcattctgtaaacgggaaacattgcaaacatttaaaaaagtctgggatcccatgactcaactcactgcaacctttgcatccctgggctttgaaccctggttctctgaaccctagtcacttctttctttttgagacggtctcgctctgtcacccaggctggagtgcagtggcgcgatcttggctcattgcaacctctgcctcctgagttcaaacgattctcctacctcagcctcccgagtagctgggactataggcgtgcaccaccatgcccggctaatttttgtatttttagtagagatagggtttcatcatgttggccaggatggtctcgatctcctgaccccgtgatcctcccccacccccccgacctcccaaagtgctgggattacagacatgagccaatgcgcctggctaattttttttggtttttgtatttttagtagagatggggtttcaccgtgttagccaggatggtctcagtctcctgacctcgtgatccgcccgtctcggcctcccatagtgctgggattacaggcatgaaccaccgtgcctggccaaccctggtaacttttaacaaggaagggatcagagatgcagaggtttgatatttaaggtttcaggataaaataataagtcttacacaatgaccccagtcaggtacatgtacaaggacaggagaatcaatgtcattctccatataagatccagagtgttttggacgttattcccatgggaacagctctcgaggaagatctgccatcttctcttggaacaatttatcaaagtcttcagcttgggccactgtgaagtgatttttccagtccccagatacacctggaaacaagaagcagaaactcaggtcagaccacacatctccttgacctgtctccaccaggcacctgacatggacattgtagctaacatagcagaatggccgatggttcgtggtgggcctttatcctgcctggtcacatagttattcacctagctggaaacaatttcctattttctcctttctcccatccatcctgtgtacaattcctcagcaataacgccagtatatcatctgatatgtccagaatcaagtcacgtctcaccacctctgtttctaccacgttgactcaagccaacatcatttttcacctggattattagagtacacttgtaactggtctctgcttttttttctttttttttttgtagagacggagtcttgctctatccctcaggctggagtgcagtagcgcgatcttggctcactgcaacctctgcctcccgagttcaagcagttctcgtgcctcagcctcccgaatagctgggattacaggtgcctaccaccacgcctggctaatttttgtatttttagtagagatggggttttgccat[138 bp omitted]cagcatggcagccctcatgatcccagatcatgccacttctctgctcagattttccgaggactctaggtttcactcaagtacaagtgctggaggcgcttacagggctccaggtgatccagcccctgtggcttctctgagctcatcccctaaaactaccctctccgtcactctactcacacggggacttctgattctgcctcaaacgtggcaggcatccccactcctcagactattggcgtcccacgctccttctccttggaacgctgctctctcagattggcccatgacttgcctatttgcctctttcaagtctttattccaattcaagtttctcagcgaggttctctctcaccacccaatttagaggtcactccccatccttgctgtatttcgcctcataacacatatcatgtaggacaggttctgtgtattttctttctgtggtgtatgtgtatggtatgtatccctaatatagataagttatacaaagtctcagcatttatctttttttttttttttgagatggagtcttgctctgtctcccaggcaggagtacagtgttgtaatctcggctcactgcaacctctgcctcctgggttcaagcgattctcatgtctcagccccaccccaagtagctgggactacaggtgggcgccaccacacatggctaatttttgtatttttagtagaaacagagtttcaccatgttgccc[132 bp omitted]aaggatttaattcttttcttccacggaggactgtcccagatgtattagaactgtaggattttggaaaaatggatttttgttttgagccggagtttcactcttgttgcccaggctggagtgcaaatggcaggatctcggctcactgcagcctcctcctcccaggttcaagtgattctcctgcctcagcctcccgagtagctgggattacaggcgcccaccaccacacttggctaattttttgtatttttagtagagatgggctttctccgtgttagccaggctggtcttgaactcctgacctcaggtgatccacccgccttggcctcccaaagtgctgggattacaagcatgagccaccacgcctggccctggaaaaatggattctttcaccccatgcaatagacatttccattcatcttggcaccttacagcgtgtgatagcaaagtctctcttctctcccttttccaggtgaggcattccttcacacatttcttcatccaggacagatctctttttttttttttttttttttttttttgagacggagtcttgctctgtcgcccaggctggagtgcagtggcacgatcttggctcactgcaagctccgcctcctgggttcacaccattctcctgcttcagcctcccgagtagctgggaccacaggcacccgccaccatgcccggctaattttttgtatttttagtggagatggggtttcaccatgttagccaggatggtcttgatctcctgaccttgtgatccgcccgcctcggcttcccaaagtgctgggattacaggcatgagccaccgcacccggcccatccaggacagatctctatgctaactcaccagtggggcagctgcactgtggccatccccaaccccgtccttgtcctcatttctcaggtgaatcacagcttgtaggtctagcaagggttgctagttaacctgctcactgtctgtagaatggataatgctcatgtcacattctgaggaaagagaatctgaatgacctcacgtaagtcagataaccttcccgggcggaaccaattttccccacccacctacagcccacatcagtaccacaagaagaggctccctgctgaggccacgggagaagtgttc[132 bp omitted]aaaccatgtctttactaaagatacaaaaattagctgggtgtggtggcgtgtgcctgtaatttccagctactcgggaggctgaggcagaagaatcacttgaatcctggaggcggacgttgcagtgagctgagatcgcaccactgcactccagcctgggtgatagagcaagacttcatctcggaaaaaaaaaaaaaaaaaaagcactctttcatctcaactgttagcgcccagttgtgaccataggcatgcatgccgtgtattctggtatatttggaaaccagaggattttcttttaccttttctcagaagttgtgctttgtccactacataatcaacactcaggagggaataattggacatcttgttttctttcatgctctgaaaggagctgttcttgagaattaagttcagttcttcgggttctaacgtctttcccaggaattgacagatcttctctatggttcttcctgtgtcctaaaaaagaaaaatcaagagagaggatacgaaagagaaagacaaggctgggcgtggtggttcacgcctgtaatcccagcactctgggaggctgaggcggttggatcacttgagatcaggagttcgagactagcctggccaacgtggtgaaaccccatctctactaaaaatacaaaaattggcagggtgtggtggtgggcgccggtaatcccagctactcgggaggttgggggaggagagttgcttgaacccaggaggtggagggtgcagtgagctgagatcacgccactgcactccagcctggtgacagagtgagaccttgtcaaaaaaaaaaaaaaaaaaaaaaaaagacaatagaaaaaagtaagatgagaaggagggaaccgcagaatgaggaggaggaggaagaagagaggaacaacatgcagatgtgagaagggattgagttgaatgcaattaggagaaagaaagaaaaaaggtaaagaagagagggcatgaagtatgtaaaagatgcaaggatgggttgggcgccgtggctcctgcctgtaattccagcactttgggaggctgaggcaggcggatcacttgagtccgggagttttagaccagcctgggcgatatagtgagaccctgtctctacaaaaaatacaaaaattagccaggcatggtggcgcacagctgtggtaccagctacttgggaggctgaggtgggaggatcacctgaacccaggaagttgaggctgcagtgagctgtgattgcaccactgtactccagcctgggcgttggagtgagaccctgtctcaaaaacaaaacaaagcaaaacaaaacaaaacaaaaccaaccagaaaaccacaaaagatgcaaggatcatcgtggattttcccgtatggtagagtttaggacaacttaacagtaaaacacagagcctcgggtttcctaagagacgtttagagaggcttctagacagtaattagggttagcaaggagaggttcagggagaatctgatggagattgaaggcttgatttcaaatcctggctgtactgtcagatagtactgtttcccataactagcttttgaataacacacagagttttacaatatcttcttatatttcatctcaataattaggactaggtacatgatcctgggagattaatagatttttatttttaaaattttatttatgtatttatttagagacaagatctcactctgtcgcccaggctggagtgcagtggcatgatctcagctcactgcaacctccgcctcccaggctcaagcaattctcctgtctcaacctcccgagtagctggggttacaggcgtgcgccaccactcccggctaatttacgtatttttagtagagagggagtatcaccatgttggccaagctgggttccaactcctgagctcaggtgatctgcccacctcagcctcccaaagtgctgggattatggatgtgaaccaccgcacctggccaacaaaatggattattgtaaccagaaggactttgctttgaatcataggccttactcttagatctataatgctttaattttttcctctatttcataaaccttggttatctaataagaagatgtacaactatggaaataactaaaataagttcattgtgtgatccgaaaggaagatcccaggaaggtatgggatcgtgtatctgaggtagccaaccaaacttgttacaaagggcttcttaacagaaatgaaattcattccagcttggtcaacgtggtgaaaccccatctgtaccaaagatacaaaaattagccaggtgttgtagtgcatgcctgtaatcctagctacttgggaggctgaggcacgagaatcacttgaaccggagaggtggagattgcaatgaactgagattgcgccactgcactccagcctgggtgacagagcaagactctgtctaaaaaaaaaaaaaaaaaaaaagatggccgggcgcggtggctcatgcctgtaatcctagcactttgggaggcctacgggaggattgcctgagctcaggagttcgagaccagcctgggcaacatggtgaaaccctgtctctactaaaaatacaaaaaaaaattagctgggcatggcggcgtgcatctgtagtcccagctactcaggaggctgaggcagaagaatcgcttgaacccgagaggcggaggttgcagtgagccgagatcgtgccactgcactccagcctgggcgacagagcaagactccacctcataaaaaaaaaaaaaaaagaaattcatgcccagaccataggccatagaggattggagaggatgagccagaggaaggtgttgggacgtgacgtttcccaggtggtacaaaatccaatgttggtgttattttctcttttatgtgagatatcactaataggtcaagttcttttttttttttgagatggagtcttgctctgttgcccaggctggagtgcaatggcatgatctcggctcactgcaacctccgcctcctgggttcaagcgattctcctgagtagctgggtcctgagtagctgggactacaggtgcacaacaccacgcctggctaattttttatatttttggtagagatgggatttcgccatgttgcccaggctggtatcgaactcctgacctcaagtgatccccctactttggcctcccaaagtgctgggattacaggtgtgagacaccgtgcccagccttctttttctttctttttttttttttttgagacagggtctcattctgttgcccagcctagagtgcagtggtgtgatctcggctcactgcaacctcttcctcctgggttcaagtgattctcctacctcagcctcccaagtagctgggactacaggtgcctgccaccatgcccggctaattttttgtatttttagtagagatggggtcttgctatgttggccaggctggtctcgaactcctggactcaagccatccacctgccttcacctccccagtgctgggattacaggcgtgagccactgagcttggcctcaagttgttctttcaatacttgctggttctgagtatcatcggacagcttttcctctccgtcactattcactccagtacttggatctcagaatagtgagataaattgattacatgccttcatttctgttcataccagccaagctgagatgtcagacactcggaaccatctcaggaactaaatcacttctacccagtcccatcctctcttccagcgccctctcaacgcttggttatcagcagcaccataggtctcacccagagaaatgtttacatacaccagtgctagcaggagacatcacactctgcctcaatgcatggaatatgctccttatttttatttttagagccggcgtcttgctctgctgccccaggctggagtgcagtggtgtgatcatagctcactgcagccttgaattcatgggctcaagtaattcccctggcctcggcttcccgagtagctggaattagaggtgtgcaccccccacatctggctaattttttttttcctttgtagactggagtcttgctgtttcgtagactggagtcttgctggtctcaaactcccagcctcaagtgattctcccacctcggccttccaaagtgct[132 bp omitted]ctcactgcaaactccacctcccaggttcaagcgattctcctgcctcagcctcccgagtagctgggattacaggcgctcgccactgcacccggctaatttttgtatttgtagtagagatggggttt[133 bp omitted]agcttgggcaagggtcaaccagaaacagggcaatgaagaccagggagttaatcctgctctttgtgactcttcaccaggctccactttaactgagagggtggaatgaagacacagcgggatggagggaatttaaggaaagtaaggatggtggtgagagggtgtgcactgactctaaaaatgatgggattacctgtttcagctcctcataactcagtaacaggaagtttttctcctctctcatgggcatccagccatgaatgtggtcaaaccatgacccatatagcactgcatggggtggcagaaaaagtgataggttacaaattttatgagagcaggcatccagtctattatgttcatccccccaccggcttgttaacgtatgattgacaaataaaacttgaatgaaacttggtcgaaggggaccaacaaatggtatatatttacagtatataacagatgttttgatgtacgcatacactatggaatgacagtgtattagtcagttttcacactgctgtgaagaactgcccaagactgggtaattcacaaaggaaagtggcctaattgactcacagttcagtgtggctgggggagcctcaggaaactcacaatcatggaggaaggggaagcaaggcaacttcctcacaaggcggcaggagggaggagtgagtgccagcaggggaaatgccagccacttataataccatcagatctcaaatgtggcatgtatacaccatggaatacaatgcagccatgaaaaaggatgagttcatatcctttgtagggacatggatgaagcgggaaaccatcattctgagcaaactatcgcaaggacagaaaaccaaacaccacatattctcactcataggtgggaattgaacaatgagaacacttggacacagggtggggaacatcacacaccggggcctgtcatggggcggggggagggggagggatagcattaggagatatacctaatgtaaatgacgagttaatgggtgcagcacaccaacatagcacatgtatacatatgtaacaaacctgtacgttgtgcacatgtaccctagaacttaaagtata[174 bp omitted]gatggcgggcgcctgtagtcccagctactcgggaggctgaggcgggagaatggtgtgaacctgggaggcggagct[134 bp omitted]tcactgtcatgagaacagcatgggggaaaccactactatgatccaatcacttcccaccaggtccctcctacaacacgtggggattatggggattacaattcgagatgagatttgggtggggacacaaagcctaaccatatcagacagaatcaagctaattaacatattcatttcctcatatacttaccattttttgtcggggcggtgagaacatttaagatggtctctcttagcaattgtcaagtatggaatacattattattattattattattattattattattattattattgacacagagtctcactctgtcacccaggctgtagtgccatggagtgatctcggctcgctgcaacctctgcctcctagattcaagcgattctcctgccttagccttccaagtagctgagactacgggcacatgccaccacactcggctaattttttgtatttttaatagagatagggctttgccatgttggccaggctggtcttgaactcctgacctcaggtgatccgcctgcctcggcctcccaaagtgctgagaccagaatgaagatattaatcaagatggtaggacttaattaataattagagataggaaagtggtgaggggcctaggggagtgggatgggaaaagagaatgcttatgaaatattagactcatgctagtctttgcatgaggggtggagtaagataaaccccacgcagttaagaaaggtgttcaaatgtttttatttgagatggagttttgattttgttgcccaggctggggtgcagtggcgtgatcttggctcactgccacctctacctcctgggttcaagcaattctcgtgcctcagcctcctgagtagctgggattacaggcacccaccaccacggccagctaatttttctgtatttttagtagagacagtttcattatgttggccaggctggtctcgaactcctgaccccaggtgatccacctgcctt[131 bp omitted]gcctcggcctcccatagtgttgggattacatgtgtgagccaccgcgcccagccagaaaggtgttcaaatttgagtgtactgaattagaggcattggtggctctctctaatggaggtatctgtagctggtgtattgcagagagacacatcacagctgagatagaggctcatagagttttgagatcaattgcaaaatggaaagtactgaaaaagcccaggaattctgcataactaaatatatagcgatcctagagtcatgcaatcagttctgagacagatagaaacagaatattaagagggttttggaaagaggcatcagaaaaaaatggcggaaggtcaggattgtgttgtcccggaagccagtgaaaagctaacttccagacatctagcattaggagactagaggagaatataagtttcctgtgctagtattggaggctctagagacttagaaaatagctaggatggtttatcatggggcaagctgaggggccggctagagttctgctgctatgcgggagagtaagcgaacttagcaggtttggcctccaggggtggtggagcctttcaacccatgggttggtgagatgtagagatgtgaggctgggtgtcaaaagaggtcggctagaagactccaagcacccccatattttgtgaaacactcaccagttccttgacaaaaccattcaaaatattcttcccatgactttggtttcttaataaacttcatgtttttccagaaaaaataaccagacaccaaaacatctctgggatttctcatgagataaatcaccttaaatggaaaaacgggagaatgaaaaatcaatacagtcaatcctcactctttttgatcttcacaaaaatggagaaaaagccaattcctggataatgcctaataatatcaatggattcttttaacaaattacttactgcactcactaatcaaatttgatgtgcctatgaagtagtcactgcactaggaatatatcaatggaagaaggaagcatcgttccttccctctgggatattacagtctgctcacaatgggaagaacatggaaggtttccaaaggtgagtgatgtatatttgtgtactatggtttaaagatcattaacaggagaatgaattcataaattaagctacattcatagatatatagcaatattatccatatacaacacccaagatcatggacacatttcagagacattactttgtcctttgggccaggcatggtggctcatgcctgtaatcctagcactttgggaggctgaatcactcgaggtcaggagttcgagaccagcctggccaacatagtgaaaccctgtgtctactaaaaatacaaaaattagccaggcatggtggcgcacacctctagtcctagctactcaggaggctggagcaggagaatcacttgaacctggggaggtggaggttgcagtgagccaagatcgcaccaatgcactccagcctgggtgacagaatgagactgtgtctcaaaataataataataataataattcacacacctataaacaccttccaggaaagtacaattctagaagcagtctgagccatgcaaggtcctggatatgccttgtccctcttgtgatcacccctctgccccatgggagatgcatgtggctgctgatatcaacacatatttacacacagtaagacgaagtgtgtacagagcccagtcctggccccggggcagtcaacctggatacaggcattgattgatgaacatgctgcttcccataggaacacctctgtgtcttttctgtggcaggaggcatttgttgaattcagattggctaattattttttagggcaaccaaaggcggttatctagtatataatatggctatacattctgattgcacttagaacctagttttctaagattctgggttagtgttttcaccctatccctggtttaaatctggctggggtaatctgtggaatggtctatatccttgaactcaaggacagttctgggagcagccacataggtgtcacctaatacggaatctcaggtctcaacaacacagacctgttgaaggagaatgcatttcagcaagatctccagatgacttataggcatatcagtgtttgaaaggcactgatcaaacacgtcttaaccattatgcactgaccttggccttggaactgaagaaagacttggggaataactggatggggaggtgggaggagaataaacgtggactctccgtttcactgagtgctgtatacccaatctcactctctacccagggtgatcgctcccagatgggcacagattggatccacttggcatcccccttggagtgcatcaggcagagaatctcagccaaccagtttgttcc[220 bp omitted]gaggcagagaattgcttgaacctgggaggcggaggttgcggtgagccgagatcgtgccatggcactccagcctgggcaacagagtgagactcagtctcaaaaaaaaaaacaaaaacaaaaacaaaaaaaagtaccatctcaaccttaatttttttattatttatttatttatttatttattttgagacagagtcttgctctgtcacccaggctggagtgcaatggcacgatctcagttcactgcaagctgtgcatcccgggttcatgccattctcctgcctcagcctcccaagtagctgggactacaggcgcccaccaccacgtct[131 bp omitted]cactgcgcctggctttttttttttttttttttagcgatgaggtctccctctgtagcccaggctagagtgcagtggtgcaattatagcccactgcagccttgaactcgggctcaagtgatccttgtacttcggcctcctgcttcagcctcgcaagtatctgagacctcaggcatgtgccatcgcgctgggctaattttttgaaaaaattttattgtagagatcaggccttgctatgttgcccaggctggtcttgaacgcttgacctcaagcaatctgcctatcttgccctccc[137 bp omitted]acctccatctcctgggttcaagtgattctcttggtcagcctcccgagtagctggaactacagacgtgcgccacagcgcctggctaattttttatttttagtagagacggggttttgccatgttggccaggctggtgtcgaactcctgacctcaggcaatccacctgccttgacctcccaaagtgctgggattacaggtatgagccaccatgcccagcctgtcaaccacttttaagcctacggtttcgtagtgttaagtgttaagtatattcccagtgctgctcaaccaatctccagaggatttttgtgttgcaaaaccgaaactctatgcagagccagcaccgactccccatttacccttctcttcagcccctggcagccgccagtgtactttctgtttctatggacttgatgactccaggtaccttatgtaagtggaatcacacactatttgtatttttgtgactggcttatttcatttagcataatgtccttgatgtttatctctgttgtatcatgcatcagaattttcttccttctcaaggatgaataacattccattatagctatataccacattttgtttattcactcacctgtcagtggatatctgggttgcttccatcttttggctatttgctgaaatccctcttattatgttcccattgctcttggcctctcagggccatgccacttccaatgtcttcagcctcaatcctcaccgcatccgcagtgctcttaccgccctccacccacagccccactcccagagacatatgatcctcatctttcagccccttgagattgcctggctcttttgtggttcctggccattgccctgatgattctcctatctgaaaatagccctccccccaagtaatttcatactcattctttgcatttccatttaaatgctatttcttctttcaggacatcattggtcatcctcagccatcctccctcccactgccaccaaacaaacacctgaatttgccttgggattcactcctgtggattctcctaataccttagattacccctctgaacactcatcctactgtgtaatttcctgactaaatccttttctctgattgtcaatggtattaggcattcctctcttccccttaaagcattgtacactgtctgacataaaggaagaactccaatcatgcactgaatggacaggaacacaaccacagcctttctcagttcacgattctgcctccttacctgatttggggtaagtcaatattattacatcttcatcccttatcacgaactcatcacgtacttttcttaaggtttcggatctgaaacccatagtagggaaagctatgccttcaaaccataagaaatcgtccgacatgatgatgacctcttcctgcgtggtgtgagggtttcaactgtagccaccgctggaggctgtggcagctacaggcagatcagcttttacagcaaggataaaacgatctttaaccttgtcccagcatgtcacatgtttgttgtaaagtttacttgctgataaagagaggtataatgtgacccatactcaaaagattgaagatgttgagcaatcatgaacttatctagagaccattttaggggtcatctgagcttgcgttcctgagagtgaactgcaagatcgaataacaaacacgaggacaaatattttttttgataatatgggtgaatttatttcttaaggtttgagtgcaaacttaaaaacaagaacaaagcttttcatcaagcataaacacaaaatctaaataatcctgcaatcgtgcattttaacagaaagtacaaatatgaatacattataatttgtaactgcatttaaaaattaaaatatgtctctccaaatccaaaagaccacacagtctttatctgttctcatcttgttaccttagaaacatttgtcatatgctctcaggaaaatataggcaagaattactaatcagttattcacgatcaaagaaacattattctccctgagactttttgaatcatttatctgtatttctgaagtatcacacaattatacctccactctagagaaaaaaagagtaagtacaaatattagcagtgtatatattgtagtaaatttttaaagtacaactttagttgatggctgacgtgtatgtaataattgtgaacaatttaaacggtataaaaatgtgagatgaaaatctttagactcaaatacttgaaaagtcactatgaatatggaaagatttgtttgcataaacatgtatgtttttagatggaaaatcaagaggtagtggcatctccctgtttccttaataatatttggattttcacaaagaattggcagcacccaaccttaagtgttaattatgtgtttgtttgttttttttttttttttgagatggagtctcactctgtcgtccaggctggagtgtagtggcgcgatctcggcttgctgcaagctctgcctactgggttcatgccattctcctgcctc[134 bp omitted]agcctaattatgtgtttctaaaggacctatacaacagatcagttggcagtgttctagctttagggagatgggggtggattgggggtgcaaatatctgagataagataatgcatgcactcacacatttaaaatcaccattctaaatgggaaaaaaaaatcacatattgggaaagtccaagaaactcattcttaagggataaacagcagggcaggagcaaaagctgaatagaagtctacttgataataatgttttttcactcttcaaaggcaagttgggaagaatgagaatactcacatacacataacttcagggaaaacgtgcctagaattttaccttgcaaaaca[222 bp omitted]gaggc[138 bp omitted]tgtttataatacttgatttttcccttattaccaccctgtacatcacatttaagtattttctttataaatattttagagcaaaaagaatttattttgttgcaatggtggcccacatctgtacaaaacaacctaaacaagatatatatgtatatatatatgcatatatatatgcgcatatatatatgcatatatataaaatgattaagaaaaagtgcaaagaataacagtattaagaatttttgcattttatagtaactgtggttcaagcgtgaatatctatcagcgatatataatcccaggttttactttttaattttatttatttatttattgttttgagatggactcttgctcttgtcacccaggttagagtgcaatggcatgatctcgggctcactgcaacctccgcctgctgggtccaagcgattctcttgcctcagcctcctgagtagctgggattacaggcgcccaccaccacgcctggctaatttttg[134 bp omitted]atttaattaaagattcaaaaacaaaccacactccaaattactgcacaaacatcggtcccttatcaagcaagtctgcccttctcctgaatctagtatttccagtttctaaactcttcccaaacaggaaaaaaatatttttaatacgcctcattttttagggcacttttagacttacagaaaaattgcaaagagagtacagagagttcccatagtccatacttaatttggatttccttagtttttatctcatgctcgtgttttttttttttttttttgacagagttctctctttgttgcccaggctgaagtgcagtggcatgatcctggctcactgtctcatgccctttttttgccccaaaatcccatcctgtatagtacatgacatacactcatcctgtctccttgggctcctcttggctgtgacagttgttgctcagactttcctcattttttttttttttgagatggagtcttgctctgctgcccaggctggagtgcagtggcacaatcttggctcactgcagcctctgcctccccagttcaagtgattctcctgcctcagcctcacgagtagctgggattacaggcacgcgccactacacccggctaatttttgcatttttagtagaaacggggtttcaccatattggccaggctggtctcgaactcctgacctcaggtgatccgcccactttggcctcccaaagtactgggattacaggtgcgaaccactgcgcctggccgactttcctcatttttgatgaccttgatggttttgaagaacactggtgaggcattttgtacaatgttcctcctttgggatttattgcaggttttctcatccaacaaatgagttcatgggttttggagaggaaggtcacagaggtaaaataccatgatcatcacaccatatcaaggggacttattagcaacatgacctggcactaatgatgttgaccttggtcaccagaggtcacttgacttttctccctcttccctttctatgtggccatattttaaacataaactctaggcctgaatatattagtgagataacattatatgaaccccaaatgagggacagtctgcaaaatgacgggcctgtactttttaaattgtgaaaaaattttttttttttgaaacggagtctcgtgctcagttgcccaggctggagtgcagtggcacgatctcagctcgctgcaagctctatacctcctgggttcacgccattctcctgcctcagcctcccgagtacctgagactacaggtgccagccacca[138 bp omitted]cctggcctattatttattttattttattttgagatggagtctcactctgttgcccaggctggagtgcagtggtgcaatctcagctcactgcaacttccgcctctccagttcaagtgaacctcttgcctcagcctcctgagcagctgggattacaaaggtgtgccaccatgcccagctaagttttgtacttttagtagagatggggtttcaccatgttggccaggcaggtcttgaactcctgatctcaggtgatccacctgccttgacctcccaaagaattacaggcatgagccgccacgcctggccatacttatatcttttttaaaaagacaaaggatattattatttgacagaaaagggaaataaaaggaccattaaaccatacaattgattattaatcatacctgtaatcagggaaatacaaatcaaaatcacagtaatgcatgtaggttgtcacttcttatacgttagaagaaaaaaatgggatgatactacctgttggtcaggccgttcgaatttgggggatctgttcatttgcatggtggtattggaggagagtttcagaaagtaactggagttgaaacttgcagagatatatgtccttggagacattttcatacatggacaaggaaactcgaaaaaaaaatgtgtatttcaacattgcaaccgtgaaaaatgggaaaccagttgaatttggggatgaatgattaatttaaaacacaggataagttatagaatatgtggaagatgacactatagttgaatgaatgaatgaatgaatgaatgaatgggacttacatctgtcagcctgcacacactcagcacagaatgttagaggaacaggcagattcctaattatgaagagatggtgctcaggccacgttcacaggcacagagcagtggggagaggtgccatgatcgtaaacaccacgggcaggaagttgcagaacaatttcacctctggaaaggggagcagagcagcagactcaggaaagactttagaagaagcctcaattgtgttttgactttctcactggagtctttatctgaagccatagggcaaaatgatagccttaaagagttttgttgacatgcttttcttttcttttttttttttgagacagagtcttactctgtttttcaggctggagtgcaatggcgtgatctcggctcactgcaacctccaccttctgggttcaagtgattctcctgcctcagcctcctgagtagctgggattacaggtaggcaccaccatacctggctaatttttgtatctttagtagagatggggttttgccatattggccaagctggtctcaaacccctgacctcaagtgatctgcttgcctcagcctcccaaagtgctgggattacaggcctgagccaccgtgcccagcctgtttacctgcttttctatatgtgtgagacatttcattataaaatgaatagataaaacctaaacatggctccacgtgggcactggcagattggctgggatgagctcctgagatcttatctccagcatctggtttgggttctttccatgtctggcagtaatctctggagctggaagaatcacttcagctgtggcccagagtgaggcctctgaggagctgatctgggagaagatgtcaatgtccccccagggctgagatcagggctgtggatagtgagagaggaggtaggaagaaagtggtcagacaggcagttagggtgagtccttggtaaaactccttcaaacgaagaacagcctgaaaatccagctgcaggccccagataagaaagagctcacatcagcaaaatttcttcaaatcaagaacagcctgaatatcaagctacaggccctagataagaaacagcccgcgtccttgaatggaaatgcctgctctgtgaacctagataaacaaattccactccttttttggacacattttcctccctttgatgcatgtttgtctcatttcacatgcttcctctggattgatccttacctttcacctattttacatatacttatctttctgtgattggccgtgggcaaaatcctcatttgcataaagtgtaacatcactccagcccctaattggttgcaggccaagccttcacctcagcctctaattggctcttttcactgttgtgtgtctttctgagtggcccacagaccagtcaagcacactcctcccacttcccagtccataaaaccactgaacttagccctgcagccagcaactctttgtcgggtcacctctctttgttgagagcttttctgtcactttcgcttgataaatcccactctgtcctactcagtctccagtgtcaacgtttcttattcttcttggttgtgggacaagaacctggagcttgctggtggtgggagtaaaagaactacaacactccct[137 bp omitted]tctctactaaaaatacaaaaaattagctaggcgtggtggcgggtgcctgtaatctcagctacttgggaggctgaggcaggagaaacacttgaacccgggaggcagaggttgcggtgaactgagatcatgccactgcactccagcctgggcgacagagtgataccctgtctcaaaaaaaaaaaaaaaaattgcccctagttgagaaccactgtcttagatgtaaaagctgttattcagacaaagaggacgggtgaatgctggtgtcatcagcagagagaagggtagagttcatctcctggaggcacatttagaatagatgccatctttcacatgggcacatacttccatttcacattcattctttctaaaagaactagattataggccaggcgcggtg[131 bp omitted]gtggcgggtgcctgtagtcccagctactcagggggctgaggcgggagaatggcatgaacccgggaggcggggcttgcagttagctgagatcacgccactgcattccagcctgggtgacagagcaagactacgtctcaaaacaaacaaacaaaaaactagattataaaattctaaaagcaatcatataagcaatcatgtattttaaagacaattataataatactgccaacaacaagattatgttatttagttttcacagtgaccatgggaagggtaagaaattattttactttattttacagatgatgaaactgagacacacagatcttaaaggatacttttgaacttttaaagtcagtatttcttttgttttctttttttgtttttttgagacagagtttcactctgtctccgaggctggggtacagcgatgcgatctcggctcactgcaacctccacttcctggttcaaaccattcttgtgcttcagcctcccaagcaactgggattacagccccccaccatcatgcctggctaatttttgtatttttggtagacatggggtttcaaccatgttggccaggctggtctcgaactccttacctcaggtgatctgcctgccttggccatccaaagtgctgggactacaagggtgagccaccacacccggtctaaagtcagtattttttcttttcttttcttttttttttttttttttttg[235 bp omitted]gcctcccaaagtgctggtattacaggcgtgagccaccgcgcccggccataaagtcagtattttttcatccataaacatttagatgaagattatttcgtgccagacattctaagtacttta[132 bp omitted]tcctggattttacgccattctcctgcctcagcctccc[213 bp omitted]gatgcaggatctgaaccacagagaggttaggttgtgggctcaagaacacacagcaaacaagttcccacctcaaactgaaacccagaacatgtgctcttaatcacaacactgttaggctcccttttctcccgcaggaaaaaaatgattaattaactcatcct[133 bp omitted]tctgctcaaaatacaaaaattagccgggcatggtggtgctgcacacctgtagtctcagctattcgggaggctgaggcaggagaatcgcttgaacctgggaggcggaggttgcagtgagccgagatcgtgccattgcactccagcctgggcacagagtgagactctgtctcaaaaaaaagaaagtgacctagttgtgattcaaactcaggtttagtcctttgaatttgtgctgagtcatcattctgctaatggaattggaaaacttagaacatttgttccaggaaggaatgttaggaaagaaacaagtggtcctggcaacattttatagtacttagtttagaaatcaatttttcagtatccttcagttgcaaaatacagattgtgaaattattaatgttctgttttctttactagtacctaacaaaccacccccaaacttagtggcttaaagtagagatttggcaaacttttttttgtttgtttgtttttggtggagggagggagtgaggtggctccctgacccaaggtcttccatggtccaacctccctcaccgccatcccacctgcaaagggagggcacagaactgttttctgttctatgactccatagggcagacttttttttttttttttttttgagaagggctagagaatgaatattttcagctttgaaggccatgtttctactactctgccattacagcatgaaaacattatggacaatacatccatgaatgagtgtggccgtgtgccaacaaaactttgcttaccaaacaaggtagtgggcccgatttggtttgtatatggtagtttgctgactcctggcttaaaacacaattctgtggttctagggctttactgggctcagctgagtggttctaatttggagtctgtcatgatactgcagccagataatatctagggctgggattgtttgaagacttcttcactcacatggcttgcacctgggctctgaaggttggaacagcttcgggctggttggacatctgtatcttaaagatgcctctcatactcctattccaatttcttttattccccccattccgatttctaaaaataaaagaaaaaaattaaaagatgcctctctgtgtgactagcttgggcttccttacagcatggccgtctcccagtgaggatgctccaagagacttaaggtgatactttcaatgtttcttaggatctgactttaggagtcacaggcatcacttctgctttattctattggttaaaacctagtcataggtccagtcctgattcaaggggaaggaatgacacagggaataaatactggtagatcgctctttgggtaccatctttgggaacaagccaccagtttgatttttcagagaacttgctgacttccagatgctaatattcttgtggcccagtaaagatcacacaaacccaaataacatggccaggatggaaatacatacctttatgtgataactgttcatagcagaaggttttataccctccctttggtagacagtttactggagaaatctgaaaagaatgctattgataaaaattcactttgactgtaagaattgtggttatttgataggtttttggatgctcacgttgaaacagagtggagagttgatatgtaggttgagaaataaacatttagtctggacaatgtgtgtgcattatgggaagatgtgttaagccctggccaggcctgctagcttcagagagctagctcatgggtcaacttcagactctggaagaaggactttcaccccactttccatctgcacgctatgtcaagtcaggggtccctgatatctgtggtccaagctctacaaatgcgtgtgttcactgtacagcaggggaagtgtgcctttgagtttctgctaaataggcttaattccacctgccacaagctgacaaagacctgagatcagggcttcatgctatctagttatctccctgtgtacctttgccctttccatttacctataaacggcatgcctgggcaacgcaccaggatctacttccatcaggttggtggaaaagtaattgcggtttttgccattacatttatgacattgcaattacttttttttttttttttttttgagacggagtctcactctgttgaccgggctggagtgcagtggcatgatctcggctcactacaacctctgcctcccaggttcaagcaattctctgcctcagcctcccgagtagctgggattacaggcacctgccaccatgcccagctgatgtttgtatatttagtagagatggggttttcaccatgttgcccaggctggtcttgaactcctgacctcgtgattcacccgtctcggcttcccaaggtgttgggattacaggcgtgagccaccatgcccggcctttttatttttattgattttttttttttaggtggggtctcactttgtcatccaggctggagtgcagtggcacgatcttagctcactgcaacctccgcttcccaggttcaagcgattcttctgcctcagcctcctgagtagctgggattacaggcatgtgccaccatgcctggctaatttttgtatttttagtagagatgggatttcaccatgcaaccccagctcactgtaacctctgcctcccaggttcaagcaattctctgcctcagcctcccgagtacctgggattacaggcacccgctgccatgcccagctaatttttatatttttagtagagacagggtttcaccattttggccaggctggtctggaactcctgacctcaggtgatccacccatctcagcctcccaaagtggtgggattacagacgtgaggcactgcacccagccaagaaaccgcagttacttttgcaccaacctaataggagccattcctggacattggtcccgtttttattttatgatccaggggctccatctggatttgcaggaagagagaacagaagtttcacactgattccaggccaaagccttgagcgctagcacccgttggcagaggactcctgcatttgcaggatatttaggaacgccctggcaacaacagaagtggaacattcctcatttttcactgcccttctgacgctgtgcacgtaatttttttgtagaaggaaatagatcaaattgtaggagttaggaagcaaatgcctgaggttgaatgcgctctgtatttggtatctgctggatgataggaaatgggtttttttgttttgttttgtttttgtttttgttttttttttgagacagagttttgctcttgctgcccaggctggagtgcaatgacgcgatctcgactcactgcgacctccgcttcccgggttcaagcgattctcctgcctcagcctcctgcgtagctgggattacaggcatgcgcgaccatgcgtggctaatttggtatttttagtagagacggggtttctgcatgtcggtcgggctggtctcaaactcccgacctcaggtgatccacctgactcaggcctcccaaagtgctgggattacaggcatgagccacctcgcccagccaggaaatggttttattgtggacttctattttagtcccccacccccaggaagtataatccctctaactgcctggatggctcccatcctgtttataagactccagggagggaatcatcagtctcgtttcaatctatagattggtgcaaaagtaactgtggttttggccattactttcaatggcaaatctgcaattacttttgcaccaaccttaatagggttcctaattgttaggatgtattgcaagacactatagtggcatagcccagatggggcaaacagaatatgtatggtttgtttcctgactctgagcagtcagcagtcgatgcacagaactctgcacgcccctccccccacagtgtctattccggttcaagcatgcctactgaaacactaatttaagtcctttaatttctaccggttgaccctgatgatgtctgtgatgtttagacttttgtgtcagcttggctagcctgcagtacgcagttttttgtttttttttaacagaatcttgccctgtcgtccaggctggagtgcagtggcacaatctcagctcactgcaacctctgccacccgggttcaagcaattctcctgcctc[134 bp omitted]cagcctcccaggcatgagccactgtgcccggcccagtacccacttgtttaatcaaatgctagcctaggtgttgctgtgacagtatttcgtagacacagttaacatctacaatcagttgattttaaataaaggagatgaatggcgataacctgggtgggcccaagctaatcagttgaaggccttaagaacataaagaggtttcctgtagaagaaattctgcctgaagactgcagcatcaaatcctctctaagcttccaaacttccagcgtgccctacagattttggacttgccagcctctacaactgcatgagtcaatttcgtcaatttctttactcctccctgccgtgttttttttttttttgaaacagagtctcgctctgtcgcccaggctagagtgcagtggcacgatctcagctcactgcaacctccgccttctgggttcaagcgattcttgtgcctcagcctcccaagtagctgggattacaggcgtgcgccaccatgcccagctaatttttgtgtttttagtagagacggggtttccccatactggccaggctggtcttgaactcttgacctcatgcaatccacccacctctgcctcctaaagtgttgggattacaggcatgagccgccgtacccagcccaatttcttgaaatcaatcactttcctgttgattctgtttccctggagagtgctaactgtccccttatcctatgccacagatttactcttctgatcctttcatttatttgatactcggtgaattatacgaacactaactatgggctgggccccatcttgtccaataatttcccctctgcatataagcccagactcaatttaagatccctaaaacatgcaccagtgcccagatgtccttaatggagctaaggtttcaggctattgaagatgttaggaagggaggacagaaaccaaacacagtaagttctcaacacagaattcagaatttctctcttattctatatgattgttcttctgactacatatataccttttgtgacaaaatacgaacacctttggagattaagtgcttaaccagtgggattgcttcatatatcattatctgtagcctcactccctcaattatttctttcttttttttttttttttttttttgagacagggtgttgctctgtcacccaggctggagtgcagtggcaggatctcggctcactgcaacctctgcctcccgggttcaagcgattctcctgcctcaacctcccgagtagctgggactacgggcatacgccaccatgcccggctaatttttttttttttttgtaaaaagagagggggtttcaccatgttggccaggttggtcttgaactcctgacctcaaatgatctgcctgcctcggcctcccaaagtgctgaggttacaggcgtgagccaccgtgcccagccatctactcttaagtttggttgaagtttgtttatatattgttaggttacagtttgccacataaggaggcagctttaggccaaatttcacttaatttaaacaactggttttctcaatgctgcagtgaggtgagggcagaaaggcttgagcgcttgatgtgtcgggagggaaatatcttcactaacatagaacaacctgaaatttcaatggatcacatctgagaaatgaatctgaggttgagttgaaatcaaatatataaagtcaggtaggagtgaggacaaaatgccaatacttgatgtttcataaatgctttcatacataccagggaactattattatctctattttagagttaaaaaagggggtgttcagagtggttaatcattttacgaagtcatgtagctcctaagtggcagagctgggatttgatcccaggcactttcattccaagtctgtgtttgtaatctgtgacttatggtccccaaaagatacgttcacgtcccaacctctggaacctaccaatgtgaccttatttggaaaaagggtctttgcagatggcatcaagtgaagaatctcaagatgagagtatcattaattacctggtgggccttaaatccaataacaagtatccttatgagataaaaaagaggagaagacacaggcacacagagtagaaggccacatgaagttggaggcagagactggagtgttgcagccataagccaccgaaggtctgcagccaccaggcgctggaagagaccaggaaggatccttccccagagcctccagagggaatgtggcctgaccgataccttgattttggacttctggcctccagcactgtgagagaataacccacgatagtgtggtggtttgctctggcaggcacaggaagctaatacagtgctctttagttctacatggccccgcttcctccagagctacgtgggccttccctattagttgatgttcatcagttctattgcacaaagctgaagatgtccaacaacggtactcaaatcccacacatccttggggaccttgagggttctaggctctctaaggtaaggtgcctgttagggaggacagaatccagaaacagtgagttcgtttttttttcttttctttttctgttttttttgagagggagtttcactcttattgcctggctggagtgcaatggcaagatctcggctcactgcaacctccgccttccgggttcaagcaattctcctgcctcagcctcccgagtagctggaattacaggcatgtgtcaccactccaggctaattttgtatttttagtagagatggggtttc[137 bp omitted]tctcccattctgtactcttctcta[154 bp omitted]gaaaatacagaaattagctgggcgtggtggcaggctcctgtaatcccagctactccagaggctgaggcaggagaattgcttgaactcggagggcggaggttgaagtgagccgagattgtgccactgcaatccagcctgggtgacagagtgagactctgttacacacacaaaaaaaaacaaaaaacaaaacaacaaacaaacgtttgcatctgaaagaaatctgcatacttttgtatcattttcgttgatatttctctcaggttcatcaatcttgccagaagatctgcagaatctgcagatattcttactagagaagccgcagtgagtgtgaacatttcagccggggatgggaggaaggaaaagcagtcctggggacattttttgctccaggggaccagtgatgctccattaagtggcacttgcagatcaagttctgtttctgctttgaacagaatgttcaggcacccgagagatagaacaaagtgctgaactccgttcttcacgtcattaaccttaatgaccttcagacagttcccatccatacacagagtcctacagatttttgagatccaaaaggttattttactattgtcttaccaaatttctaggggacttgtctttagaattaggtagcggctatgtgaatcttccaggggtaaaggtcctctgcttcctcacagggattctcccacaatcccttcctgcatgccacaaacacagcatgtccctttcccctcaatccctgcaccttccaggcaacatttaatgcacctttttttttttttgagacagagtctcacccaggctggagtgcagtggtgcgatctcggctcactgcaacctccgcctcctgggtacaagtgattcttctgcctcagcctcttgagtagctgggactataggcacatgccaccacgcctggctaatttttctatttttagtagagacggggtttcaccacattggccaggctggtctacaactcctaaccccatgatctgcccaccttgccctcccaaagtgctgggattacaggcatgagacaccgcgcctggcctttttttttttttttttctttttttttaggacagagtctcacccaggttggagtgcagtgacacgatctctgttcactgcaacctccgcctcccgggttcaagcgattcccctgcctcagcctcctgaacagctgggattacaggcacccgtccccatgcccgggtaatttttgtatatttagtagagatggggtttcaccatg[135 bp omitted]gggctaagcctcaattttggggctcgcctgtgctgcatcagcttcacacctagagaagagagtgaaagagaagggagagccgtccttttgggctgccttgaaataaaggttgacccatgggttcatgtattgtcattcattctcattttctcttcctctctttctctctctcccctgccccttaagttagcttttctaaaccctacctggataaggataagaaatagaaggaggggacactttaggatgctacaaaataaaatacaacaacaacaacaataacagcagcagcaacaacaaaacagcaacaaaaggggaagaaacaaatctggccactgcacattcctccttggcaacaaaaagccgtggatgcaaaaagctgcccttcactgcatagacagaacagggcgcgctcgagctatgaatctcggaaattactcaaaccatcagcctctgcaagaagcaaagtggacggccgggcgcggtggctcactcctggaatcccagcactttgggagcccgaggtgggcggatcacgaggtcaggagatcgagactgttctggctaaaccagtgaaaccccctctctactaaaaaaataagaaaagcgaagtgcatctcccataaacgaggtactgcaggaagaaagcagaaaatgagacccgagtacacacatgcacgcgggcgcgcgcacacacacaccagaagaaatgaaccaagaggaaaggaaacattttcaaataagcatttggagatgggaaaaacacgttgaaacagaaattcataaagcacagaatttttttttaagttaaaaaaggaacaataatagacagaaaatgaatgaaaaattaaatgtcatatcagaagtgaagataaattaaaagtggtcaagggagaagagatctaaatgcaaacttaagaaggggcaattttttttttttttttttttttgagacgcagcctcactctgtcgcccgggctggagtgcagtggcgtgatcttggctcactgaaacctctgcctcctggattcaagcgattctcctgcctcagcctcccaagtggctgggattacaggcatgagccaccatgcccggcctagagtcatcatggaaattaaacaacctgcttccaaatgacttttgggtaaagactgaaattaaggcagaaataaaaaaattatctgaaactaatgaaaacaaacatacaacatcccagaatctctgggacacagctagaacagtgctcaaaggaagtttctagtgctaaagggctacactaagaagctagaaagatctcaaatgaaccgcctaacatcacacctagaggaattagaaaaacaagagcaaatcaaccccaaagctagcagaagaaaaaaaaaaaccaacatcggagctgacctgaatgaaatggagacgtaaaaaaccatacaaaagatcaatgaaacccaaagttgattttttaaaaaaattatttatttattatttattccataaattattggggtacaggtggtgtgtggttacataagctctttagtggtgatttgtgattttggtgcacccatcacctgagcagtatacactacaccctacttgttgtattttatccctcgcccccgccaactcgtccccctaagtccccaaagtccattgtatcattcttacgcctttgcgtcctcatagcttagctcccacatatcagtgagaacatacgatgtttggttttccattcctgagttacttcacttagaataacagtctccggtctcatccaggtcacggcaaatgctgttaattcatacaaagttgatatttttgaaagcataaataacatgggaagaccactagctagattaataaagaaaaaaagacaagatccaaataaacacaatcagaaatgacaaaggtgacattaccactgacccacagatatacaagaaaccctgagactattccacatgcctctatgcacacaaactagaaaactagaagaaatagagaaattcctggaaacataaaacctctcaagattgaaccaggaagaaatggaaaccctgaacaaaccaacgatgagttccaaaattgagttagtcatacaaaacctaccaaccagcacaaaaaaccttagactagacggattcacagtcgaatcctaccagatgtgtaaagaaaagccggcaccaatcctactgaaattattccacacaattgaggaggagcaactgctctctaactcattctatgaggtcagagtcattctgatactgaaacctggcagagacacaacgaaaaaaggaaaataggtaaagtaatacatatgttaatgatcttgatttagccattctacggtatatacatatttcaaaacaatatgtacatgataaatatgtacaatttgtcaattaaaaatatataaaaggaataggaaaaaattcaaatggcacagaatttgaaaggagaagatacagaacaaactccggtgtcttctttattcaactatatatacacacattcaatggactgggagcagtggctcaagcctgtaatcacagcactttgggaggtcaaggcgggcagatcacctgaggtcgggagttcgagaccagcctgaccaacagggagaaaccccagctctactaaaaatacaaaattagccgggcatggtggcgcatgcctgtaatcccagctactcggaaggctgaggcaggagaatcgcttgaactcaagaggtggaggttgtggtgagccgagatggcaccattgcactccagcctgggcaacaagagcgaaactcagtctcaaaaaaagaaaaaaaaggatttaatgaatgaatgatgagactgttggttacatctcccaccttctccctctcactccactgcagccacacggggctcctcactgttcccgtagcagcaggcatgtgcccccactgggcctctgtactggctgttcccactgcccgaacaccctcatgcaccatctgcactgtccaatatggccgcctctggccacacatggctactgagcagttgaacatggctggtccaaaccaacatttccaagacgtcgtatggtaaaaaataacataaaatcttgcaaaaatgtttctattgattatgttaaaattatgatgttttaggtatattaggttaaatcagctattttatccaaatgaatctcgcctgtttgtttttgcttttttttttttttttttttttgagatggaggctcgctctgtcgcccaggctagagtacaatggcgtggtctcggctcactgcatcactgcaacctctacctcccaggttcaagcgattctcctacctcaccctcccaagtggctgggattacaggcgtgtgccaccacacccagctaatttttgtatttttagtagagacagggtttcaccatgttggccaggctggtctcgaactgctgacctcgtgatctacctgcctcggcctcccaaagtcctgggattacaggtgtgggccactgcgccggccatgtttctcgacttctgctggcaagcatgttccagtatttgcatggctcctagccctcatctccatttctctgcacagatgttaccttccccatgaggtctgccttatacatgaggcctgtattataaactgcaactccgcattccccaaccccgttgtttcttctctccagaacactaggcaccatctgatctcctatgccttttccttattgtcagatactgaactctcagatacagttccccttcctccctccagggggcgccatggaacgcagggccctcactggccctggggactgggtgacgacaggggggagcctctggtgattggctccctcaccctgcgtaagatcaaagggactaaaggacagccccgacacccggagccattgtggctcaggcaggttgcgcctgccctcgggccctcacggaggcgggggttccagggcacgagttcgaggccagcctggtccacatgggtcggaaaaaaggacttttttttatcgttcccaatataacgacaaaacataaagggaggacgccttgataggaagaaatgacatcttcctaagtgtttttaaattacttccatgtgtcttttttttttttttttttgggagaccgagccttgctctgttgcccaggctggagtgcagtggtgtgatcttcgctcactgcaacctccgcctcgtcggttcaagggagtctcctatctaagcctcctgagtagctgggattacagtcgcctgccaagagatggggtttcgccatgttgaccaggctggtcttgaacacctggcctcaaatgatccactcgccttggtctcccaaagtggtaggatgacaggcgtgagccaccgcgcccagcctcttctattcttttagagacaggttctcactgtgttgcccaggctggagtgcattgatgtgatgtgtgatcatagctcattgcagccctgaccatccgagctcaagcaatccttctgcctcagcctcctgagtagctggggccgcagatgtgcaccactgcacctggctaatttttaacatttttgtggagccagagtctgtataaaataaagtgtaaatagtaccataaataaagaatacatagtaccattttatagtagtataaaacggacattagaaactctgaacttaaaggttaaaaaaatacacaaaagtagttctcaagttctagagacttggagaatccaggaatcaacaatgtcgtggaactcctacagcctttcataaagaatggccctcgaggaaagtggaattgtcagtgggcattgtgttcgtgcctcagctaaacacggcaggaatttatttataacctagtgtaacatcctcgaggcactgttcaattagtcaagcaattgtaaaattctcccagtcttagaaaagatacaggtgtgtgtccctctgctgtggctgtgcactgacgcttcagtaaaagttgccgtctaaaaccaccggcctgcccttgaattgttttgttttgttttgttttgttttgtttttttgattcgcagcctcactctatcacccaggctggagtgcagtgacacgatctctgttcactgcaacctccgcctcccgggttcaagcgattcccctgcctcagcctcctgaacagctgggattacaggcacccgtccccatgcccgggtaatttttgtatatttagtagagatggggtttcaccatt[135 bp omitted]gggctaagcctcaattttggggctcgcctgtgctgcatcagcttcacacctagagaagagagtgaaagagaagggagagccgtccttttgggctgccttgaaataaaggttgacccatgggttcatgtattgtcattcattctcattttctcttcctctctttctctctctcccctgccccttaagttagcttttctacaccctacctggataaggataagaaatagaaggaggggacactttaggatgctacaaaataaaatacaacaacaacaacaataacagcagcagcaacaacaacaacagcaacaaaaggggaagaaacaaatctggccactgcacattcctccttggcaacaaaaagccgtggatgcaaaaagctgcccttcactgcatagacagaagagggcgcgctcgagctatgaatctcggaaattactcaagccatcagcctctgcaagaagcaaagtggacggccgggcgcggcggctcactcctggaatcccagcactttgggagcccgaggtgggcggatcacgaggtcaggagatcgagactgttctggctaaaccagtgaaaccccctctctactaaaaaaataacaaaagcgaagtgcatctcccataaacgaggtactgcaggaagaaagcagaaaatgagacccgagtacacacatgcacgcgggcgtgcgcacacacacaccagaagaaatgaaccaagaggaaaggaaatattttcaagtaagcatttggagatgggaaaaacaccttgaaacagaaattcataaagtacacacatgtttttttttttaagttaaaagaggaacaataataaacaggcagaaaatgaataaaaaataaaatgtcatatcagaagtgaagataaattaaaagtggtcaaaggagaagagatctaaatgcaaacttaagaaggggcaattttttttttttttttttttgagacgcagcctcactctgtcgcccgggctggagtgcagtggcgtgatcttggctcactgaaacctctgcctcctggattcaagcgattctcctgcctcagcctcccaagtggctgggattacaggcatgagccaccatgcccggcctagagtcatcatggaaattaaacaacctgcttccaaatgacttttgggtaaagactgaaattaaggcagaaataaaaaaattatttgaaactaatgaaaacaaacatacaacatcccagaatctctgggacacagctacaacagtgctcagaggaagtttctagtgctatatggctacattaagaagctagaaagatctcaaatgaaccgcctaacatcacacctagaggaattagaaaaacaagagcaaatcaaccccaaagctagcagaagaaaaaaaaaaaacaaaatcagagctgagctgaatgaaattgagatgtaaaataccatacaaaagatcaatgaaacccaaagttgattttttaaaaaaattatttatttattatttattccataaattattggggtacaggtggtatgtggttacataagctctttagtggtgatttgtgattttggtgcacccatcacctgagcagtatacactaccccctatttgttgtcttttatccctcgccctcgccaactcgtccccctaagtccccaaagtccattgtatcattcttatgcctttgtgtcctcatagcttaggtcccacatatcagtgagaacatacgatgtttggttttccattcctgagttacttcacttagaataatactctccggtctcatccaggtcactgcaaatgctgttaattcatacaaagttgatatttttggaagcataaataacatggaaagaccactagctagattaataaagaaaaaaagacaagatccaaataaacacaatcagaaatgacagaggtgacattaccactgacccacagacatacaagaaaccctgagactattccaaatgcctctatgcacaaaaactagaaaactagaagaaatagagaaattcctggaaacataaaacctctcaagattgaaccaggaagaaatggaaaccctgaacaaaccaacgatgagttccaaaattgagttagtcatacaagacctaccaaccagcgcaaaaaaccttagactagacggattcacagtcgaattctaccagatgtgtaaagaaaagccggcaccaatcctactgaaattattccacacaattgaggaggagcaactgctctctaactcattctatgaggtcagagtcattctgataccgaaacctggcagagacacaacgaaaaaaggaaaataggtaaagtaatacatatgttaatgatcttgatttagccattctacggtatatacatatttcaaaacaatatgtacatgataaatatgtacaatttgtcaattaaaaatatataaaaggaagaggaaaaaattcaaatggcgtagaatttgaaaggagaagatacagaacaaactccagtgtcttattattcaactatatatacacacgttcaatggaccgggagcagtggctcaagcctgtaatcacagcactttgggaggtcaaggcgggcagatcacctgaggtcgggagttcgagaccagcctgaccaacagagagaaaccccagctctactaaaaatacaaaattagccgggcatggtgacgcatgcctgtaatcccagctactcgggagggtgaggcaggagaatcgcttgaactcaagaggtggaggttgtggtgagccgagatggcaccattgcactccagcctgggcaacaagagcgaaactcagtctcaaaaaaaaaaaaaaaaaaaagaaaaaggatttaatgaatgaatgatgagaccgttggtgacatctcccaccttctccctctcactccactgcagccacacggggctcctcactgttcccgtagcagcaggcatgtgcccccacagggcctctgtactggctgttcccactgcccgaacaccctcatgcaccatctgcactgtccaatacggccgcctctggccacacatggctactgagcagttgaacatggctggtccaaaccaagatttccaagacgtcgtgtggtaaaaaaaacaacataaaattttgcaaaaatgtttctattgattatgttaaaattatgatgttttaggtatattaggttaaatcagctattttatcaaaatgaatctcgcctgtttgtttttgcttttttttttttttttttgagatggagtctcgctctgtcgcccaggctagagtacaatggcgtggtctcagctcactgcatcactgcaacctctacctcccaggttcaagcgattctcctacctcaccctcccaagtggctgggattacaggcgtgtgccaccacacccagctaatttttgtatttttgtagagacagggtttcaccatgttggccaggctggtctcgaactgctgacctcgtgatctacctgcctcggcctcccaaagtcctgggattacaggtgtgggccactgcgccggccatgtttctcgacttctgctggcaagcatgttccagtatttgcatggctcctagccctcatctccatttctctgcacagatgttatcttccccatgaggtctgccttatacatgaggcctgtattataaagtgcaactgccaattcgccaaccccgttgtttcttctctccagaacactaggcaccatctgatctcctatgccttttccttattgtcagatactgaactctcagatacagttccccttcctccctccagggggcgccatggaacgcagggccctcactggccctggggactgggtgacgtcaggggtgagcctctggtgattggctccctcaccctgcgtaagatcaaagggcctaaaggtcagccccgacacccggagctattgtggctccggccggttgcgcgggccctcggaccctcagagaggcgagggttcgagggctcgagttcgaggccaacctggtccacatgggttgaaaaaaaaattttttttatcgttcccaatataacgacaaaacataaagggaggacgccttgataggaagaaatgacatcttcctaagtgtttttaaattacttcaatgtatctttctttttttttttttttttgggagaccgaggcttgctctgttgcccaggctggagtgcagtggtgtgatcttggctcactgcaacctctgcctcgtcggttcaagggagtctcctatctcagcctcctgagtagctgggattacagtcgcctgccaagagatggggtttcgccatgttgaccaggctggtcttgaacacctggcctcaaatgatccactcgccttggtctcccaaagtggtaggatgacaggcgtgagccaccgcgcccagcctcttctattcttttagagacagcgtctcactctgttgcccaggctggagtgcattgatgtgatgtgtgatcatagctcattgcagccctgaccatccgagctcaagcaatccttctgcctcagcctcctgagtagctggggccgcagatgtgcaccactgcacctggctaatttttaacattttttgtggagccagagtctgtataaaataaagtgtaaatagtaccataaataaagaatacatagtaccattttatagtagtataaaacggacattagaaactctggacttaaagtttaaaaaaatacacaaaagtagttctcaagttctagagacttggagaatccaggaatcaacaatgtcgtggaactcctacagcctttcataaagaatggccctcgaggaaagtggaattgtcagtgggcattgtgttcgtgcctcagctaaacacggcaggaatttatttataacctagtgtaacatcctcgaggcactgttcaattagtcaagcaattgtaaaattctcccagtcttagaaaagatacaggtgtgtgtccctctgctgtggctgtgcactgacgcttcagtaaaagttgccgtctaaaaccaccggcctgcccttgaattgttttgttttgttttgttttgttttgttttgttttgttttgtttttttgattcgcagcctcactctatcacccaggctggagtgcagtgacacgatctctgttcactgcaacctccgcctcccgggttcaagcgattcccctgcctcagcctcctgaacagctgggattacaggcacccgtccccatgcccgggtaatttttgtatatttagtagagatggggtttcaccatg[135 bp omitted]gggctaagcctcaattttggggctcgcctgtgctgcatcagcttcacacctagagaagagagtgaaagagaagggagagccgtccttttgggctgccttgaaataaaggttgacccatgggttcatgtattgtcattcattctcattttctcttcctctctttctctctctcccctgccccttaagttagcttttctacaccctacctggataaggataagaaatagaaggaggggacactttaggatgctacaaaataaaatacaacaacaacaacaataacagcagcagcaacaacaacaacagcaacaaaaggggaagaaacaaatctggccactgcacattcctccttgccaacaaaaagccgcggatgcaaaaagctgcccttcactgcatagacagaagagggcgcgctcgagctatgaatctcgaaaattactcaaaccatcagcctctgcaagaagcaaagtggacggccgggcgcggcggctcactcctggaatcccagcactttgggagcccgaggtgggcggatcacgaggtcaggagatcgagactgttctggctaaaccagtgaaaccccctctctactaaaaaaataagaaaagcgaagtgcatctcccataaacgaggtactgcaggaagaaagcagaaaatgagacccgagtacacacatgcacgcgggcgcgcgcacacacacaccagaagaaatgaaccaagaggaaaggaaacattttcaaataagcatttggagatgggaaaaacaccttgaaacagaaattcataaagcacagaatttttttttaagttaaaaaaggaacaataatagacagaaaatgaatgaaaaattaaatgtcatatcagaagtgaagataaattaaaagtggtcaaaggagaagagatctaaatgcaaacttaagaaggggcaatttttttttttttttttttttgagacgcagcctcactctgtcgcccaggctggagtgcagtggcgtgatcttggctcactgaaacctctgcctcctggattcaagcgattctcctgcctcagcctcccaagtggctgggattacaggcatgagccaccatgcccggcctagagtcatcatggaaattaaacaacctgcttccaaatgacttttgggtaaagactgaatttaaggcagaaataaaaaaattatttgaaactaatgaaaacaaacatacaacatcccagaatctctgggacacagctagaacagtgctcaaaggaagtttctagtgctatatggctacactaagaagctagaaagatctcaaatgaaccgcctaacatcacacctagaggaattagaaaaacaagagcaaatcaaccccaaagctagcagaagaaaaaaagaaaaccaacatcggagctgacctgaatgaaatggagacgtaaaaaaccatacaaaagatcaatgaaacccaaagttgattttttaaaaaaattatttatttattatttattccataaattattggggtacaggtggtgtgtggttacataagctctttagtggtgatttgtgattttggtgcacccatcacctgagcagtatacactacaccctacttgttgtattttatccctcgcccccgccaactcgtccccctaagtccccaaagtccattgtatcattcttacgcctttgcgtcctcatagcttagctcccacatatcagtgagaacatacgatgtttggttttccattcctgagttacttcagttagaataacagtctccggtctcatccaggtcacggcaaatgctgttaattcatacaaggttgatatttttgaaagcataaataacatgggaagaccactagctagattaataaagaaaaaaagacaagatccaaataaacacaatcagaaatgacaaaggtgacattaccactgacccacagatatacaagaaaccctgagactattccacatgcctctatgcacacaaactagaaaactagaagaaatagagaaattcctggaaacataaaacctctcaagattgaaccaggaagaaatggaaaccctgaacaaaccaacgatgagttccaaaattgagttagtcatacaaaacctaccaaccagcacaaaaaaccttagactagacggattcacagtcgaatcctaccagatgtgtaaagaaaagccggcaccaatcctactgaaattattccacacaattgaggaggagcaactgctctctaactcattctatgaggtcagagtcattctgataccgaaacctggcagagacacaacgaaaaaaggaaaataggtaaagtaatacatatgttaatgatcttgatttagccattctacggtatatacatatttcaaaacaatatgtacatgataaatatgtacaatttgtcaattaaaaatatataaaaggaataggaaaaaattcaaatggcacagaatttgaaaggagaagatacagaacaaactccggtgtcttctttattcaactatatatacacacattcaatggactgggagcagtggctcaagcctgtaatcacagcactttgggaggtcaaggcgggcagatcacctgaggtcgggagttcgagaccagcctgaccaacagggagaaaccccagctctactaaaaatacaaaattagccgggcatggtggcgcatgcctgtaatcccagctactcggaggctgaggcaggagaatcgcttgaactcaagaggtggaggttgtggtgagccgagatggcaccattgcactccagcctgggcaacaagagcgaaactcagtctcaaaaaaagaaaaaaaaggatttaatgaatgaatgatgagactgttggttacatctcccaccttctccctctcactccactgcagccacacggggctcctcactgttcccgtagcagcaggcatgtgcccccactgggcctctgtactggctgttcccactgcccgaacaccctcatgcaccatctgcactgtccaatacggccgcctctggccacacatggctactgagcagttgaacatggctggtccaaaccaagatttccaagacgtcgtatggtaaaaaataacataaaatcttgcaaaaatgtttctattgattatgttaaaattatgatgttttaggtatattaggttaaatcagctattttatccaaatgaatctcgcctgtttgtttttgcttttttttttttttttttttttttgagatggaggctcgctctgtcgcccaggctagagtacaatggcgtggtctcggctcactgcatcactgcaacctctacctcccaggttcaagcgattctcctacctcaccctcccaagtggctgggattacaggcgtgtgccaccacacccagctaatttttgtatttttagtagagacagggtttcaccatgttggccaggctggtctcgaactgctgacctcgtgatctacctgcctcggcctcccaaagtcctgggattacaggtgtgggccactgcgccagccatgtttctcgacttctgctggcaagcatgttccagtatttgcatggctcctagccctcatctccatttctctgcacagatgttaccttccccatgaggtctgccttatacatgaggcctgtattataaactgcaactccgcattccccaaccccgttgtttcttctctccagaacactaggcaccatctgatctcctatgccttttccttattgtcagatactgaactctcagatacagttccccttcctccctccagggggcgccatggaacgcagggccctcactggccctggggactgggtgacgacaggggggagcctctggtgattggctccctcaccctgcgtaagatcaaagggactaaaggacagccccgacacccggagccattgtggctcaggccggttgcgcctgccctcgggccctcacggaggcgggggttccagggcacgagttcgaggccagcctggtccacatgggtcggaaaaaaggacttttttttatcgttcccaatataacgacaaaacataaagggaggacgccttgataggaagaaatgacatcttcctaagtgtttttaaattacttccatgtgtcttttttttttttttttttgggagaccgagccttgctctgttgcccaggctggagtgcagtggtgtgatcttcgctcactgcaaactccgcctcgtcggttcaagggagtctcctatctaagcctcctgagtagctgggattacagtcgcctgccaagagatggggtttcgccatgttgaccaggctggtcttgaacacctggcctcaaatgatccactcgccttggtctcccaaagtggtaggatgacaggcgtgagccaccgcgcccagcctcttctattcttttagagacagggtctcactgtgttgcccaggctggagtgcattgatgtgatgtgtgatcatagctcattgcagccctgaccatccgagctcaagcaatccttctgcctcagcctcctgagtagctggggccgcagatgtgcaccactgcacctggctaatttttaacatttttgtggagccagagtctgtataaaataaagtgtaaatagtaccataaataaagaatacatagtaccattttatagtagtataaaacggacattagaaactctgaacttaaaggttaaaaaaatacacaaaagtagttctcaagttctagagacttggagaatccaggaatcaacaatgtcgtggaactcctacagcctttcataaagaatggccctcgaggaaagtggaattgtcagtgggcattgtgttcgtgcctcagctaaacacggcaggaatttatttataacctagtgtaacatcctcgaggcactgttcaattagtcaagcaattgtaaaattctcccagtcttagaaaagatacaggtgtgtgtccctctgctgtggctgtgcactgaggcttcggtaaaggttgccgtctaaaaccaccggcgtgcccttgaattcttttttttttttttttctttttcagacggagtcgcactctatcacccaggctggagtgcagtgacacgatctctgttcactgcaacctccgcctcccgggttcaagcgattcccctgcctcagcctcctgaacagctgggattacaggcacccgtccccatgcccgggtaatttttgtatatttagtagagatggggttttcagcatg[136 bp omitted]ggctaagcctcaattttggggctcgcctgtgctgcatcagcttcacacctagagaagagagtgaaagagaagggagagccgtccttttgggctgccttgaaataaaggttgacccatgggttcatgtattgtcattcattctcattttctcttcctctctttctctctctcccctgccccttaagttagcttttctaaaccctacctggataaggataagaaatagaaggaggggacactttaggatgctacaaaataaaatacaacaacaacaacaataacagcagcagcaacaacaacaacagcaacaaaaggggaagaaacaaatctggccactgcacattcctccttgccaacaaaaagccgcggatgcaaaaagctgcccttcactgcatagacagaagagggcgcgctcgagctatgaatctcggaaattactcaaaccatcagcctctgcaagaagcaaagtggacggccgggcgcggtggctcactcctggaatcccagcactttgggagcccgaggtgggcggatcacgaggtcaggagatcgagactgttctggctaaaccagtgaaaccccctctctactaaaaaaataacaaaagcgaagtgcatctcccataaacgaggtactgcaggaagaaagcagaaaatgagacccgagtacacacatgcacgcgggcgcgcgcacacacacaccagaagaaatgaaccaagaggaaaggaaacattttcaaataagcatttggagatgggaaaaacaccttgaaacagaaattcataaagcacagaatttttttttaagttaaaaaaggaacaataatagacagaaaatgaacgaaaaattaaatgtcatatcagaagtgaagataaattaaaagtggtcaaaggagaagagatctaaatgcaaacttaagaaggggcaattttttttttttttttttttgagacgcagcctcactctgtcgcccgggctggagtgcagtggcgtgatcttggctcactgaaacctctgcctcctggattcaagcgattctcctgcctcagcctcccaagtggctgggattacaggcatgagccaccatgcccggcctagagtcatcatggaaattaaacaacctgcttccaaatgacttttgggtaaagactgaatttaaggcagaaataaaaaaattatttgaaactaatgaaaacaaacatacaacatcccagaatctctgggacacagctagaacagtgctcaaaggaagtttctagtgctatatggctacactaagaagctagaaagatctcaaatgaaccgcctaacatcacacctagaggaattagaaaaacaagagcaaatcaaccccaaagctagcagaagaaaaaaaaaaaccaacatcggagctgacctgaatgaaatggagacgtaaaaaaccatacaaaagatcaatgaaacccaaagttgattttttaaaaaaattatttatttattatttattccataaattattggggtacaggtggtgtgtggttacataagctctttagtgatgatttgtgattttggtgcacccatcacctgggcagtatacactacaccctacttgttgtattttatccctcgcccccgccaactcgtccccctaagtccccaaagtccattgtatcattcttacgcctttgcgtcctcatagcttagctcccacatatcagtgagaacatacgatgtttggttttccattcctgagttacttcacttagaataacagtctccggtctcatccaggtcacggcaaatgctgttaattcatacaaagttgatatttttgaaagcataaataacatgggaagaccactagctagattaataaagaaaaaaagacaagatccaaataaacacaatcagaaatgacaaaggtgacattaccactgacccacagatatacaagaaaccctgagactattccacatgcctctatgcacacaaactagaaaactagaagaaatagagaaattcctggaaacataaaacctctcaagattgaaccaggaagaaatggaaaccctgaacaaaccaacgatgagttccaaaattgagttagtcatacaaaacctaccaaccagcacaaaaaaccttagactagacggattcacagtcgaatcctaccagatgtgtaaagaaaagccggcaccaatcctactgaaattattccacacaattgaggaggagcaactgctctctaactcattctatgaggtcagagtcattctgataccgaaacctggcagagacacaacgaaaaaaggaaaataggtaaagtaatacatatgttaatgatcttgatttagccattctacggtatatacatatttcaaaacaatatgtacatgataaatatgtacaatttgtcaattaaaaatatataaaaggaataggaaaaaattcaaatggcacagaatttgaaaggagaagatacagaacaaactccggtgtcttctttattcaactatatatacacacattcaatggactgggagcagtggctcaagcctgtaatcacagcactttgggaggtcaaggcgggcagatcacctgaggtcgggagttcgagaccagcctgaccaacagggagaaaccccagctctactaaaaatacaaaattagccgggcatggtggcgcatgcctgtaatcccagctactcggaaggctgaggcaggagaatcgcttgaactcaagaggtggaggttgtggtgagccgagatggcaccattgcactccagcctgggcaacaagagcgaaactcagtctcaaaaaaagaaaaaaaaggatttaatgaatgaatgatgagactgttggttacatctcccaccttctccctctcactccactgcagccacacggggctcctcactgttcccgtagcagcaggcatgtgcccccactgggcctctgtactggctgttcccactgcccgaacaccctcatgcaccatctgcactgtccaatacggccgcctctggccacacatggctactgagcagttgaacatggctggtccaaaccaacatttccaagacgtcgtatggtaaaaaataacataaaatcttgcaaaaatgtttctattgattatgttaaaattatgatgttttaggtatattaggttaaatcagctattttatccaaatgaatctcgcctgtttgtttttgctttttttttttttttttttttttgagatggaggctcgctctgtcgcccaggctagagtacaatggcgtggtctcggctcactgcatcactgcaacctctatctcccaggttcaagcgattctcctacctcaccctcccaagtggctgggattacaggcgtgtgccaccacacccagctaatttttgtatttttagtagagacagggtttcaccatgttggccaggctggtctcgaactgctgacctcgtgatctacctgcctcggcctcccaaagtcctgggattacaggtgtgggccactgcgccggccatgtttctcgacttctgctggcaagcatgttccagtatttgcatggctcctagccctcatctccatttctctgcacagatgttaccttccccatgaggtctgccttatacatgaggcctgtattataaagtgcaactccgcattccccaaccccgttgtttcttctctccagaacactaggcaccatctgatctcctatgccttttccttattgtcagatactgaactctcagatacagttccccttcctccctccagggggcgccatggaacgcagggccctcactggccctggggactgggtgacgacaggggggagcctctggtgattggctccctcaccctgcgtaagatcaaagggactaaaggacagccccgacacccggagccattgtggctcaggccggttgcgcctgccctcgggccctcacggaggcgggggttccagggcacgagttcgaggccagcctggtccacatgggtcggaaaaaaggattttttttatcgttcccaatataacgacaaaacgtaaagggaggacgccttgataggaagaaatgacatcttcctaagtgtttttaaattacttccatgtgtctttttttttttttttttttgggagaccgagccttgctctgttgcccaggctggagtgcagtggtgtgatcttcgctcactgcaacctccgcctcgtcggttcaagggagtctcctatctaagcctcctgagtagctgggattacagtcgcctgccaagagatggggtttcgccatgttgaccaggctggtcttgaacacctggcctcaaatgatccactcgccttggtctcccaaagtggtaggatgacaggcgtgagccaccgcgcccagcctcttctattcttttagagacagcgtctcactctgttgcccaggctggagtgcattgatgtgatgtgtgatcatagctcattgcagccctgaccatccgagctcaagcaatccttctgcctcagcctcctgagtagctggggccgcagatgtgcaccactgcacctggctaatttttaacatttttgtggagccagagtctgtataaaataaagtgtaaatagtaccataaataaagaatacatagtaccattttatagtagtataaaacggacattagaaactcagaacttaaaggttaaaaaaatacacaaaagtagttctcaagttctagagacttggagaatccaggaatcaacaatgtcgtggaactcctacagcctttcataaagaatggccctcgaggaaagtggaattgtcagtgggcattgtgttcgtgcctcagctaaacacggcaggaatttatttataacctagtgtaacatcctcgaggcactgttcaattagtcaagcaattgtaaaattctcccagtcttagaaaagatacaggtgtgtgtccctctgctgtggctgtgcactgaggcttcggtaaaggttgccgtctaaaaccaccggcgtgcccttgaattctttttttttttttttttctttttcagacggagtcgcactctatcacccaggctggagtgcagtgacacgatctctgttcactgcaacctccgcctcccgggttcaagcgattcccctgcctcagcctcctgaacagctgggattacaggcacccgtccccatgcccgggtaatttttgtatatttagtagagatggggtttcaccatg[135 bp omitted]gagctaagcctcaattttggggctcgcctgtgctgcatcagcttcacacctagagaagagagtgaaagagaagggagagccgtccttttgggctgccttgaaataaaggttgacccatgggttcatgtattgtcattcattctcattttctcttcctctctttctctctctcccctgccccttaagttagcttttctacaccctacctggataaggataagaaatagaaggaggggacactttaggatgctacaaaataaaatacaacaacaacaacaataacagcagcagcaacaacaacaacagcaacaaaaggggaagaaacaaatctggccactgcacattcctccttggcaacaaaaagccgtggatgcaaaaagctgcccttcactgcatagacagaacagggcgcgctcgagctatgaatctcggaaattactcaagccatcagcctctgcaagaagcaaagtggacggccgggcgcggcggctcactcctggaatcccagcactttgggagcccgaggtgggcggatcacgaggtcaggagatcgagactgttctggctaaaccagtgaaaccccctctctactaaaaaaataacaaaagcgaagtgcatctcccataaacgaggtactgcaggaagaaagcagaaaatgagacccgagtacacacatgcacgcgggcgtgcgcacacacacaccagaagaaatgaaccaagaggaaaggaaatattttcaagtaagcatttggagatgggaaaaacaccttgaaacagaaattcataaagtacacacatgtttttttttttaagttaaaagaggaacaataataaacaggcagaaaatgaataaaaaataaaatgtcatatcagaagtgaagataaattaaaagtggtcaaaggagaagagatctaaatgcaaacttaagaaggggcaattttttttttttttttttgagacgcagcctcactctgtcgcccgggctggagtgcagtggcgtgatcttggctcactgaaacctctgcctcctggattcaagcgattctcctgcctcagcctcccaagtggctgggattacaggcatgagccaccatgcccggcctagagtcatcatggaaattaaacaatgaaacccaaagttgattttttaaaaaaattatttattatttattccataaattattggggtacaggtggtatgtggttacataagctctttagtggtgatttgtgattttggtgcacccatcacctgagcagtatacactaccccctatttgttgtcttttatccctcgccctcgccaactcgtccccctaagtccccaaagtccattgtatcattcttatgcctttgtgtcctcatagcttaggtcccacatatcagtgagaacatacgatgtttggttttccattcctgagttacttcacttagaataatactctccggtctcatccaggtcactgcaaatgctgttaattcatacaaagttgatatttttggaagcataaataacatggaaagaccactagctagattaataaagaaaaaaagacaagatccaaataaacacaatcagaaatgacagaggtgacattaccactgacccacagacatacaagaaaccctgagactattccacatgcctctatgcacaaaaactagaaaactagaagaaatagataaattcctggaaacataaaacctctcaagattgaaccaggaagaaatggaaaccctgaacaaaccaacgatgagttccaaaattgagttagtcatacaagacctaccaaccagcgcaaaaaaccttagactagacggattcacagtcgaattctaccagatgtgtaaagaaaagccggcaccaatcctactgaaattattccacacaattgaggaggagcaactgctctctaactcattctatgaggtcagagtcattctgataccgaaacctggcagagacacaacgaaaaaaggaaaataggtaaagtaatacatatgttaatgatcttgatttagccattctacggtatatacatatttcaaaacaatatgtacatgataaatatgtacaatttgtcaattaaaaatatataaaaggaagaggaaaaaattcaaatggcgtagaatttgaaaggagaagatacagaacaaactccagtgtcttattattcaactatatatacacacgttcaatggaccgggagcagtggctcaagcctgtaatcacagcactttgggaggtcaaggcgggcagatcacctgaggtcgggagttcgagaccagcctgaccaacagagagaaaccccagctctactaaaaatacaaaattagccgggcatggtgacgcatgcctgtaatcccagctactcgggagggtgaggcaggagaatcgcttgaactcaagaggtggaggttgtggtgagccgagatggcaccattgcactccagcctgggcaacaagagcgaaactcagtctcaaaaaaaaaaaaaaaaaaagaaaaaggatttaatgaatgaatgatgagaccgttggtgacatctcccaccttctccctctcactccactgcagccacacggggctcctcactgttcccgtagaagcaggcatgtgcccccacagggcctctgtactggctgttcccactgcccgaacaccctcatgcaccatctgcactgtccaatacggccgcctctggccacacatggctactgagcagttgaacatggctggtccaaaccaagatttccaagacgtcgtgtggtaaaaaaaacaacataaaattttgcaaaaatgtttctattgattatgttaaaattatgatgttttaggtatattaggttaaatcagctattttatcaaaatgaatctcgcctgtttgtttttgctttttttttttttttttgagatggagtctcgctctgtcgcccaggctagagtacaatggcgtggtctcagctcactgcatcactgcaacctctacctcccaggttcaagcgattctcctacctcaccctcccaagtggctgggattacaggcgtgtgccaccacacccagctaatttttgtatttttgtagagacagggtttcaccatgttggccaggctggtctcgaactgctgacctcgtgatctacctgcctcggcctcccaaagtcctgggattacaggtgtgggccactgcgccggccatgtttctcgacttctgctggcaagcatgttccagtatttgcatggctcctagccctcatctccatttctctgcacagatgttatcttccccatgaggtctgccttatacatgaggcctgtattataaagtgcaactgccaattcgccaaccccgttgtttcttctctccagaacactaggcaccatctgatctcctatgccttttccttattgtcagatactgaactctcagatacagttccccttcctccctccagggggcgccatggaacgcagggccctcactggccctggggactgggtgacgtcaggggtgagcctctggtgattggctccctcaccgtgcgtaagatcaaagggcctaaaggtcagccccgacacccggagctattgtggctccggccggttgcgcgggccctcggaccctcagagaggcgagggttcgagggctcgagttcgaggccaacctggtccacatgggttgaaaaaaaaattttttttatcgttcccaatataacgacaaaacataaagggaggacgccttgataggaagaaatgacatcttcctaagtgtttttaaattacttcaatgtatctttctttttttttttttttttgggagaccgaggcttgctctgttgcccaggctggagtgcagtggtgtgatcttggctcactgcaacctctgcctcgtcggttcaagggagtctcctatctcagcctcctgagtagctgggattacagtcgcctgccaagagatggggtttcgccatgttgaccaggctggtcttgaacacctggcctcaaatgatccactcgccttggtctcccaaagtggtaggatgacaggcgtgagccaccgcgcccagcctcttctattcttttagagacagcgtctcactctgttgcccaggctggagtgcattgatgtgatgtgtgatcatagctcattgcagccctgaccatccgagctcaagcaatccttctgcctcagcctcctgagtagctggggccgcagatgtgcaccactgcacctggctaatttttaacattttttgtggagccagagtctgtataaaataaagtgtaaatagtaccataaataaagaatacatagtaccattttatagtagtataaaacggacattagaaactctggacttaaagtttaaaaaaatacacaaaagtagttctcaagttctagagacttggagaatccaggaatcaacaatgtcgtggaactcctacagcctttcataaagaatggccctcgaggaaagtggaattgtcagtgggcattgtgttcgtgcctcagctaaacacggcaggaatttatttataacctagtgtaacatcctcgaggcactgttcaattagtcaagcaattgtaaaattctcccagtcttagaaaagatacaggtgtgtgtccctctgctgtggctgtgcactgacgcttcagtaaaagttgccgtctaaaaccaccggcctgcccttgaattgttttgttttgttttgttttgttttgtttttttgattcgcagcctcactctatcacccaggctggagtgcagtgacacgatctctgttcactgcaacctccgcctcccgggttcaagcgattcccctgcctcagcctcctgaacagctgggattacaggcacccgtccccatgcccgggtaatttttgtatatttagtagagatggggtttcaccatg[135 bp omitted]gggctaagcctcaattttggggctcgcctgtgctgcatcagcttcacacctagagaagagagtgaaagagaagggagagccgtccttttgggctgccttgaaataaaggttgacccatgggttcatgtattgtcattcattctcattttctcttcctctctttctctctctcccctgccccttaagttagcttttctacaccctacctggataaggataagaaatagaaggaggggacactttaggatgctacacaataaaatacaacaacaacaacaataacagcagcagcaacaacaacaacagcaacaaaaggggaagaaacaaatctggccactgcacattcctccttgccaacaaaaagccgcggatgcaaaaagctgcccttcactgcatagacagaagagggcgcgctcgagctatgaatctcgaaaattactcaaaccatcagcctctgcaagaagcaaagtggacggccgggcgcggcggctcactcctggaatcccagcactttgggagcccgaggtgggcggatcacgaggtcaggagatcgagactgttctggctaaaccagtgaaaccccctctctactaaaaaaataagaaaagcgaagtgcatctcccataaacgaggtactgcaggaagaaagcagaaaatgagacccgagtacacacatgcacgcgggcgcgcgcacacacacaccagaagaaatgaaccaagaggaaaggaaacattttcaaataagcatttggagatgggaaaaacaccttgaaacagaaattcataaagcacagaatttttttttaagttaaaaaaggaacaataatagacagaaaatgaatgaaaaattaaatgtcatatcagaagtgaagataaattaaaagtggtcaaaggagaagagatctaaatgcaaacttaagaaggggcaatttttttttttttttttttttgagacgcagcctcactctgtcgcccaggctggagtgcagtggcgtgatcttggctcactgaaacctctgcctcctggattcaagcgattctcctgcctcagcctcccaagtggctgggattacaggcatgagccaccatgcccggcctagagtcatcatggaaattaaacaacctgcttccaaatgacttttgggtaaagactgaatttaaggcagaaataaaaaaattatttgaaactaatgaaaacaaacatacaacatcccagaatctctgggacacagctagaacagtgctcaaaggaagtttctagtgctatatggctacactaagaagctagaaagatctcaaatgaaccgcctaacatcacacctagaggaattagaaaaacaagagcaaatcaaccccaaagctagcagaagaaaaaaagaaaaccaacatcggagctgacctgaatgaaatggagacgtaaaaaaccatacaaaagatcaatgaaacccaaagttgattttttaaaaaaattatttatttattatttattccataaattattggggtacaggtggtgtgtggttacataagctctttagtggtgatttgtgattttggtgcacccatcacctgagcagtatacactacaccctacttgttgtattttatccctcgcccccgccaactcgtccccctaagtccccaaagtccattgtatcattcttacgcctttgcgtcctcatagcttagctcccacatatcagtgagaacatacgatgtttggttttccattcctgagttacttcagttagaataacagtctccggtctcatccaggtcacggcaaatgctgttaattcatacaaggttgatatttttgaaagcataaataacatgggaagaccactagctagattaataaagaaaaaaagacaagatccaaataaacacaatcagaaatgacaaaggtgacattaccactgacccacagatatacaagaaaccctgagactattccacatgcctctatgcacacaaactagaaaactagaagaaatagagaaattcctggaaacataaaacctctcaagattgaaccaggaagaaatggaaaccctgaacaaaccaacgatgagttccaaaattgagttagtcatacaaaacctaccaaccagcacaaaaaaccttagactagacggattcacagtcgaatcctaccagatgtgtaaagaaaagccggcaccaatcctactgaaattattccacacaattgaggaggagcaactgctctctaactcattctatgaggtcagagtcattctgataccgaaacctggcagagacacaacgaaaaaaggaaaataggtaaagtaatacatatgttaatgatcttgatttagccattctacggtatatacatatttcaaaacaatatgtacatgataaatatgtacaatttgtcaattaaaaatatataaaaggaataggaaaaaattcaaatggcacagaatttgaaaggagaagatacagaacaaactccggtgtcttctttattcaactatatatacacacattcaatggactgggagcagtggctcaagcctgtaatcacagcactttgggaggtcaaggcgggcagatcacctgaggtcgggagttcgagaccagcctgaccaacagggagaaaccccagctctactaaaaatacaaaattagccgggcatggtggcgcatgcctgtaatcccagctactcggaaggctgaggcaggagaatcgcttgaactcaagaggtggaggttgtggtgagccgagatggcaccattgcactccagcctgggcaacaagagcgaaactcagtctcaaaaaaagaaaaaaaaggatttaatgaatgaatgatgagactgttggttacatctcccaccttctccctctcactccactgcagccacacggggctcctcactgttcccgtagcagcaggcatgtgcccccactgggcctctgtactggctgttcccactgcccgaacaccctcatgcaccatctgcactgtccaatacggccgcctctggccacacatggctactgagcagttgaacatggctggtccaaaccaacatttccaagacgtcgtatggtaaaaaataacataaaatcttgcaaaaatgtttctattgattatgttaaaattatgatgttttaggtatattaggttaaatcagctattttatccaaatgaatctcgcctgtttgtttttgctttttttttttttttttttttttgagatggaggctcgctctgtcgcccaggctagagtacaatggcgtggtctcggctcactgcatcactgcaacctctacctcccaggttcaagcgattctcctacctcaccctcccaagtggctgggattacaggcgtgtgccaccacacccagctaatttttgtatttttagtagagacagggtttcaccatgttggccaggctggtctcgaactgctgacctcgtgatctacctgcctcggcctcccaaagtcctgggattacaggtgtgggccactgcgccagccatgtttctcgacttctgctggcaagcatgttccagtatttgcatggctcctagccctcatctccatttctctgcacagatgttaccttccccatgaggtctgccttatacatgaggcctgtattataaactgcaactccgcattccccaaccccgttgtttcttctctccagaacactaggcaccatctgatctcctatgccttttccttattgtcagatactgaactctcagatacagttccccttcctccctccagggggcgccatggaacgcagggccctcactggccctggggactgggtgacgacaggggggagcctctggtgattggctccctcaccctgcgtaagatcaaagggactaaaggacagccccgacacccggagccattgtggctcaggccggttgcgcctgccctcgggccctcacggaggcgggggttccagggcacgagttcgaggccagcctggtccacatgggtcggaaaaaaggacttttttttatcgttcccaatataacgacaaaacataaagggaggacgccttgataggaagaaatgacatcttcctaagtgtttttaaattacttccatgtgtcttttttttttttttttttgggagaccgagccttgccctgttgcccaggctggagtgcagtggtgtgatcttcgctcactgcaacctccgcctcgtcggttcaagggagtctcctatctaagcctcctgagtagctgggattacagtcgcctgccaagagatggggtttcgccatgttgaccaggctggtcttgaacacctggcctcaaatgatccactcgccttggtctcccaaagtggtaggatgacaggcgtgagccaccgcgcccagcctcttctattcttttagagacagggtctcactgtgttgcccaggctggagtgcattgatgtgatgtgtgatcatagctcattgcagccctgaccatccgagctcaagcaatccttctgcctcagcctcctgagtagctggggccgcagatgtgcaccactgcacctggctaatttttaacatttttgtggagccagagtctgtataaaataaagtgtaaatagtaccataaataaagaatacatagtaccattttatagtagtataaaacggacattagaaactctgaacttaaaggttaaaaaaatacacaaaagtagttctcaagttctagagacttggagaatccaggaatcaacaatgtcgtggaactcctacagcctttcataaagaatggccctcgaggaaagtggaattgtcagtgggcattgtgttcgtgcctcagctaaacacggcaggaatttatttataacctagtgtaacatcctcgaggcactgttcaattagtcaagcaattgtaaaattctcccagtcttagaaaagatacaggtgtgtgtccctctgctgtggctgtgcactgaggcttcggtaaaggttgccgtctaaaaccaccggcgtgcccttgaattcttttttttttttttttctttttcagacggagtcgcactctatcacccaggctggagtgcagtgacacgatctctgttcactgcaacctccgcctcccgggttcaagcgattcccctgcctcagcctcctgaacagctgggattacaggcacccgtccccatgcccgggtaatttttgtatatttagtagagatggggtttcaccatg[135 bp omitted]gggctaagcctcaattttggggctcgcctgtgctgcatcagcttcacacctagagaagagagtgaaagagaagggagagccgtccttttgggctgccttgaaataaaggttgacccatgggttcatgtattgtcattcattctcattttctcttcctctctttctctctctcccctgccccttaagttagcttttctacaccctacctggataaggataagaaatagaaggaggggacactttaggatgctacacaataaaatacaacaacaacaacaataacagcagcagcaacaacaacaacagcaacaaaaggggaagaaacaaatctggccactgcacattcctccttgccaacaaaaagccgcggatgcaaaaagctgcccttcactgcatagacagaacagggcgcgctcgagctatgaatctcgaaaattactcaaaccatcagcctctgcaagaagcaaagtggacggccgggcgcggcggctcactcctggaatcccagcactttgggagcccgaggtgggcggatcacgaggtcaggagatcgagactgttctggctaaaccagtgaaaccccctctctactaaaaaaataagaaaagcgaagtgcatctcccataaacgaggtactgcaggaagaaagcagaaaatgagacccgagtacacacatgcacgcgggcgcgcgcacacacacaccagaagaaatgaaccaagaggaaaggaaacattttcaaataagcatttggagatgggaaaaacaccttgaaacagaaattcataaagcacagaatttttttttaagttaaaaaaggaacaataatagacagaaaatgaatgaaaaattaaatgtcatatcagaagtgaagataaattaaaagtggtcaaaggagaagagatctaaatgcaaacttaagaaggggcaatttttttttttttttttttgagacgcagcctcactctgtcgcccaggctggagtgcagtggcgtgatcttggctcactgaaacctctgcctcctggattcaagcgattctcctgcctcagcctcccaagtggctgggattacaggcatgagccaccatgcccggcctagagtcatcatggaaattaaacaacctgcttccaaatgacttttgggtaaagactgaatttaaggcagaaataaaaaaattatttgaaactaatgaaaacaaacatacaacatcccagaatctctgggacacagctagaacagtgctcaaaggaagtttctagtgctatatggctacactaagaagctagaaagatctcaaatgaaccgcctaacatcacacctagaggaattagaaaaacaagagcaaatcaaccccaaagctagcagaagaaaaaaagaaaaccaacatcggagctgacctgaatgaaatggagacgtaaaaaaccatacaaaagatcaatgaaacccaaagttgattttttaaaaaaattatttatttattatttattccataaattattggggtacaggtggtgtgtggttacataagctctttagtggtgatttgtgattttggtgcacccatcacctgagcagtatacactacaccctacttgttgtattttatccctcgcccccgccaactcgtccccctaagtccccaaagtccattgtatcattcttacgcctttgcgtcctcatagcttagctcccacatatcagtgagaacatacgatgtttggttttccattcctgagttacttcagttagaataacagtctccggtctcatccaggtcacggcaaatgctgttaattcatacaaagttgatatttttgaaagcataaataacatgggaagaccactagctagattaataaagaaaaaaagacaagatccaaataaacacaatcagaaatgacaaaggtgacattaccactgacccacagatatacaagaaaccctgagactattccacatgcctctatgcacacaaactagaaaactagaagaaatagagaaattcctggaaacataaaacctctcaagattgaaccaggaagaaatggaaaccctgaacaaaccaacgatgagttccaaaattgagttagtcatacaaaacctaccaaccagcacaaaaaaccttagactagacggattcacagtcgaatcctaccagatgtgtaaagaaaaggcggcaccaatcctactgaaattattccacacaattgaggaggagcaactgctctctaactcattctatgaggtcagagtcattctgataccgaaacctggcagagacacaacgaaaaaaggaaaataggtaaagtaatacatatgttaatgatcttgatttagccattctacggtatatacatatttcaaaacaatatgtacatgataaatatgtacaatttgtcaattaaaaatatataaaaggaagaggaaaaaattcaaatggcgtagaatttgaaaggagaagatacagaacaaactccagtgtcttattattcaactatatatacacacgttcaatggaccgggagcagtggctcaagcctgtaatcacagcactttgggaggtcaaggcgggcagatcacctgaggtcgggagttcgagaccagcctgaccaacagagagaaaccccagctctactaaaaatacaaaattagccgggcatggtgacgcatgcctgtaatcccagctactcgggagggtgaggcaggagaatcgcttgaactcaagaggtggaggttgtggtgagccgagatggcaccattgcactccagcctgggcaacaagagcgaaactcagtctcaaaaaaaaaaaaaaaaagaaaaaggatttaatgaatgaatgatgagaccgttggtgacatctcccaccttctccctctcactccactgcagccacacggggctcctcactgttcccgtagcagcaggcatgtgcccccacagggcctctgtactggctgttcccactgcccgaacaccctcatgcaccatctgcactgtccaatacggccgcctctggccacacatggctactgagcagttgaacatggctggtccaaaccaagatttccaagacgtcgtgtggtaaaaaaaacaacataaaattttgcaaaaatgtttctattgattatgttaaaattatgatgttttaggtatattaggttaaatcagctattttataaaaatgaatctcgcctgtttgtttttgctttttttttttttttttttttttttttgagatggagtctcgctctgtcgcccaggctagagtacaatggcgtggtctcagctcactgcatcactgcaacctctacctcccaggttcaagcgattctcctacctcaccctcccaagtgggtgggattacaggcgtgtgccaccacacccagctaatttttgtatttttgtagagacagggtttcaccatgttggccaggctggtctcgaactgctgacctcgtgatctacctgcctcggcctcccaaagtcctgggattacaggtgtgggccactgcgccggccatgtttctcgacttctgctggcaagcatgttccagtatttgcatggctcctagccctcatctccatttctctgcacagatgttatcttccccatgaggtctgccttatacatgaggcctgtattataaagtgcaactgccaattcgccaaccccgttgtttcttctctccagaacactaggcaccatctgatctcctatgccttttccttattgtcagatactgaactctcagatacagttccccttcatccctccagggggcgccatggaacgcagggccctcactggccctggggactgggtgacgtcaggggtgagcctctggtgattggctccctcaccctgcgtaagatcaaagggcctaaaggtcagccccgacacccggagctattgtggctccggccggttgcgcgggccctcggaccctcagagaggcgagggttcgagggcacgagttcgaggccaacctggtccacatgggttgaaaaaaaaattttttttatcgttcccaatataacaacaaaacataaagggaggacgccttgataggaagaaatgacatcttcctaagtgtttttaaattacttcaatgtatctttctttttttttttttttttttgggagaccgaggcttgctctgttgcccaggctggagtgcagtggtgtgatcttggctcactgcaacctctgcctcgtcggttcaagggagtctcctatctcagcctcctgagtagctgggattacagtcgcctgccaagagatggggtttcgccatgttgaccaggctggtcttgaacacctggcctcaaatgatccactcgccttggtctcccaaagtggtaggatgacaggcgtgagccaccgcgcccagcctcttctattcttttagagacagcgtctcactctgttgcccaggctggagtgcattgatgtgatgtgtgatcatagctcattgcagccctgaccatccgagctcaagcaatccttctgcctcagcctcctgagtagctggggccgcagatgtgcaccactgcacctggctaatttttaacattttttgtggagccagagtctgtataaaataaagtgtaaatagtaccataaataaagaatacatagtaccattttatagtagtataaaacggacattagaaactctggacttaaagtttaaaaaaatacacaaaagtagttctcaagttctagagacttggagaatccaggaatcaacaatgtcgtggaactcctacagcctttcataaagaatggccctcgaggaaagtggaattgtcagtgggcattgtgttcgtgcctcagctaaacacggcaggaatttatttataacctagtgtaacatcctcgaggcactgttcaattagtcaagcaattgtaaaattctcccagtcttagaaaagatacaggtgtgtgtccctctgctgtggctgtgcactgacgcttcagtaaaagttgccgtctaaaaccaccggcctgcccttgaattgttttgttttgttttgttttgttttgttttgttttgttttgtttttttgattcgcagcctcactctatcacccaggctggagtgcagtgacacgatctctgttcactgcaacctccgcctcccgggttcaagcgattcccctgcctcagcctcctgaacagctgggattacaggcacccgtccccatgcccgggtaatttttgtatatttagtagagatggggtttcaccatg[136 bp omitted]ggctaagcctcaattttggggctcgcctgtgctgcatcagcttcacacctagagaagagagtgaaagagaagggagagccgtccttttgggctgccttgaaataaaggttgacccatgggttcatgtattgtcattcattctcattttctcttcctctctttctctctctcccctgccccttaagttagcttttctacaccctacctggataaggataagaaatagaaggaggggacactttaggatgctacaaaataaaatacaacaacaacaacaataacagcagcagcaacaacaacaacagcaacaaaaggggaagaaacaaatctggccactgcacattcctccttggcaacaaaaagccgcggatgcaaaaagctgcccttcactgcatagacagaacagggcgcgctcgagctatgaatctcggaaattactcaaaccatcagcctctgcaagaagcaaagtggacggccgggcgcggtggctcactcctggaatcccagcactttgggagcccgaggtgggcggatcacgaggtcaggagatcgagactgttctggctaaaccagtgaaaccccctctctactaaaaaaataacaaaagcgaagtgcatctcccataaacgaggtactgcaggaagaaagcagaaaatgagacccgagtacacacatgcacgcgggcgcgcgcacacacacaccagaagaaatgaaccaagaggaaaggaaacattttcaaataagcatttggagatgggaaaaacaccttgaaacagaaattcataaagcacagaatttttttttaagttaaaaaaggaacaataatagacagaaaatgaacgaaaaattaaatgtcatatcagaagtgaagataaattaaaagtggtcaaaggagaagagatctaaatgcaaacttaagaaggggcaatttttttttttttttttttttttgagacgcagcctcactctgtcgcccgggctggagtgcagtggcgtgatcttggctcactgaaacctctgcctcctggattcaagcgattctcctgcctcagcctcccaagtggctgggattacaggcatgagccaccatgcccggcctagagtcatcatggaaattaaacaacctgcttccaaatgacttttgggtaaagactgaatttaaggcagaaataaaaaaattatttgaaactaatgaaaacaaacatacaacatcccagaatctctgggacacagctagaacagtgctcaaaggaagtttctagtgctatatggctacactaagaagctagaaagatctcaaatgaaccgcctaacatcacacctagaggaattagaaaaacaagagcaaatcaaccccaaagctagcagaagaaaaaaaaaaaccaacatcggagctgacctgaatgaaatggagacgtaaaaaaccatacaaaagatcaatgaaacccaaagttgattttttaaaaaaattatttatttattatttattccataaattattggggtacaggtggtgtgtggttacataagctctttagtggtgatttgtgattttggtgcacccatcacctgagcagtatacactacaccctacttgttgtattttatccctcgcccccgccaactcgtccccctaagtccccaaagtccattgtatcattcttacgcctttgcgtcctcatagcttagctcccacatatcagtgagaacatacgatgtttggttttccattcctgagttacttcagttagaataacagtctccggtctcatccaggtcacggcaaatgctgttaattcatacaaagttgatatttttgaaagcataaataacatgggaagaccactagctagattaataaagaaaaaaagacaagatccaaataaacacaatcagaaatgacaaaggtgacattaccactgacccacagatatacaagaaaccctgagactattccacatgcctctatgcacacaaactagaaaactagaagaaatagagaaattcctggaaacataaaacctctcaagattgaaccaggaagaaatggaaaccctgaacaaaccaacgatgagttccaaaattgagttagtcatacaaaacctaccaaccagcacaaaaaaccttagactagacggattcacagtcgaatcctaccagatgtgtaaagaaaaggcggcaccaatcctactgaaattattccacacaattgaggaggagcaactgctctctaactcattctatgaggtcagagtcattctgataccgaaacctggcagagacacaacgaaaaaaggaaaataggtaaagtaatacatatgttaatgatcttgatttagccattctacggtatatacatatttcaaaacaatatgtacatgataaatatgtacaatttgtcaattaaaaatatataaaaggaataggaaaaaattcaaatggcacagaatttgaaaggagaagatacagaacaaactccggtgtcttctttattcaactatatatacacacattcaatggactgggagcagtggctcaagcctgtaatcacagcactttgggaggtcaaggcgggcagatcacctgaggtcgggagttcgagaccagcctgaccaacagggagaaaccccagctctactaaaaatacaaaattagccgggcatggtggcgcatgcctgtaatcccagctactcggaaggctgaggcaggagaatcgcttgaactcaagaggtggaggttgtggtgagccgagatggcaccattgcactccagcctgggcaacaagagcgaaactcagtctcaaaaaaagaaaaaaaaggatttaatgaatgaatgatgagactgttggttacatctcccaccttctccctctcactccactgcagccacacggggctcctcactgttcccgtagcagcaggcatgtgcccccactgggcctctgtactggctgttcccactgcccgaacaccctcatgcaccatctgcactgtccaatacggccgcctctggccacacatggctactgagcagttgaacatggctggtccaaaccaacatttccaagacgtcgtatggtaaaaaataacataaaatcttgcaaaaatgtttctattgattatgttaaaattatgatgttttaggtatattaggttaaatcagctattttatccaaatgaatctcgcctgtttgtttttgctttttttttttttttttttttttgagatggaggctcgctctgtcgcccaggctagagtacaatggcgtggtctcggctcactgcatcactgcaacctctacctcccaggttcaagcgattctcctacctcaccctcccaagtggctgggattacaggcgtgtgccaccacacccagctaatttttgtatttttagtagagacagggtttcaccatgttggccaggctggtctcgaactgctgacctcgtgatctacctgcctcggcctcccaaagtcctgggattacaggtgtgggccactgcgccagccatgtttctcgacttctgctggcaagcatgttccagtatttgcatggctcctagccctcatctccatttctctgcacagatgttaccttccccatgaggtctgccttatacatgaggcctgtattataaactgcaactccgcattccccaaccccgttgtttcttctctccagaacactaggcaccatctgatctcctatgccttttccttattgtcagatactgaactctcagatacagttccccttcctccctccagggggcgccatggaacgcagggccctcactggccctggggactgggtgacgacaggggggagcctctggtgattggctccctcaccctgcgtaagatcaaagggactaaaggacagccccgacacccggagccattgtggctcaggcaggttgcgcctgccctcgggccctcacggaggcgggggttccagggcacgagttcgaggccagcctggtccacatgggtcggaaaaaaggacttttttttatcgttcccaatataacgacaaaacataaagggaggacgccttgataggaagaaatgacatcttcctaagtgtttttaaattacttccatgtgtcttttttttttttttttttgggagaccgagccttgctctgttgcccaggctggagtgcagtggtgtgatcttcgctcactgcaacctccgcctcgtcggttcaagggagtctcctatctaagcctcctgagtagctgggattacagtcgcctgccaagagatggggtttcgccatgttgaccaggctggtcttgaacacctggcctcaaatgatccactcgccttggtctcccaaagtggtaggatgacaggcgtgagccaccgcgcccagcctcttctattcttttagagacagggtctcactgtgttgcccaggctggagtgcattgatgtgatgtgtgatcatagctcattgcagccctgaccatccgagctcaagcaatccttctgcctcagcctcctgagtagctggggccgcagatgtgcaccactgcacctggctaatttttaacattttttgtggagccagagtctgtataaaataaagtgtaaatagtaccataaataaagaatacatagtaccattttatagtagtataaaacggacattagaaactctggacttaaagtttaaaaaaatacacaaaagtagttctcaagttctagagacttggagaatccaggaatcaacaatgtcgtggaactcctacagcctttcataaagaatggccctcgaggaaagtggaattgtcagtgggcattgtgttcgtgcctcagctaaacacgacaggaatttatttataacctagtgtaacatcctcgaggcactgttcaattagtcaagcaattgtaaaattctcccagtcttagaaaagatacaggtgtgtgtccctctgctgtggctgtgcactgacgcttcagtaaaagttgccgtctaaaaccaccggcctgcccttgaattgttttgttttgttttgttttgtttttttgattcgcagcctcactctatcacccaggctggagtgcagtgacacgatctctgttcactgcaacctccgcctcccgggttcaagcgattcccctgcctcagcctcctgaacagctgggattacaggcacccgtccccatgcccgggtaatttttgtatatttagtagagatggggtttcaccatg[136 bp omitted]ggctaagcctcaattttggggctcgcctgtgctgcatcagcttcacacctagagaagagagtgaaagagaagggagagccgtccttttgggctgccttgaaataaaggttgacccatgggttcatgtattgtcattcattctcattttctcttcctctctttctctctctcccctgccccttaagttagcttttctacaccctacctggataaggataagaaatagaaggaggggacactttaggatgctacaaaataaaatacaacaacaacaataacagcagcagcaacaacaacaacagcaacaaaaggggaagaaacaaatctggccactgcacattcctccttgccaacaaaaagccgcggatgcaaaaagctgcccttcactgcatagacagaacagggcgcgctcgagctatgaatctcggaaattactcaaaccatcagcctctgcaagaagcaaagtggacggccgggcgcggtggctcactcctggaatcccagcactttgggagcccgaggtgggcggatcacgaggtcaggagatcgagactgttctggctaaaccagtgaaaccccctctctactaaaaaaataacaaaagcgaagtgcatctcccataaacgaggtactgcaggaagaaagcagaaaatgagacccgagtacacacatgcacgcgggcgtgcgcacacacacaccagaagaaatgaaccaagaggaaaggaaatattttcaagtaagcatttggagatgggaaaaacaccttgaaacagaaattcataaagtacacacatgttttttttttaagttaaaagaggaacaataataaacaggcagaaaatgaataaaaaataaaatgtcatatcagaagtgaagataaattaaaagtggtcaaaggagaagagatctaaatgcaaacttaagaaggggcaatttttttttttttttttttgagacgcagcctcactctgtcgcccgggctggagtgcagtggcgtgatcttggctcactgaaacctctgcctcctggattcaagcgattctcctgcctcagcctcccaagtggctgggattacaggcatgagccaccatgcccggcctagagtcatcatggaaattaaacaacctgcttccaaatgacttttgggtaaagactgaaattaaggcagaaataaaaaaattatttgaaactaatgaaaacaaacatacaacatcccagaatctctgggacacagctagaacagtgctcagaggaagtttctagtgctatatggctacattaagaagctagaaagatctcaaatgaaccgcctaacatcacacctagaggaattagaaaaacaagagcaaatcaaccccaaagctagcagaagaaaaaaaaaaaaaacaaaatcagagctgagctgaatgaaattgagatgtaaaataccatacaaaagatcaatgaaacccaaagttgattttttaaaaaaattatttatttattatttattccataaattattggggtacaggtggtatgtggttacataagctctttagtggtgatttgtgattttggtgcacccatcacctgagcagtatacactaccccctatttgttgtcttttatccctcgccctcgccaactcgtccccctaagtccccaaagtccattgtatcattcttatgcctttgtgtcctcatagcttaggtcccacatatcagtgagaacatacgatgtttggttttccattcctgagttacttcacttagaataatactctccggtctcatccaggtcactgcaaatgctgttaattcatacaaagttgatatttttggaagcataaataacatggaaagaccactagctagattaataaagaaaaaaagacaagatccaaataaacacaatcagaaatgacagaggtgacattaccactgacccacagacatacaagaaaccctgagactattccacatgcctctatgcacaaaagctagaaaactagaagaaatagagaaattcctggaaacataaaacctctcaagattgaaccaggaagaaatggaaaccctgaacaaaccaacgatgagttccaaaattgagttagtcatacaagacctaccaaccagcgcaaaaaaccttagactagacggattcacagtcgaattctaccagatgtgtaaagaaaagccggcaccaatcctactgaaattattccacacaattgaggaggagcaactgctctctaactcattctatgaggtcagagtcattctgataccgaaacctggcagagacacaacgaaaaaaggaaaataggtaaagtaatacatatgttaatgatcttgatttagccattctacggtatatacatatttcaaaacaatatgtacatgataaatatgtacaatttgtcaattaaaaatatataaaaggaagaggaaaaaattcaaatggcgtagaatttgaaaggagaagatacagaacaaactccagtgtcttctttattcaactatatatacacacgttcaatggaccgggagcagtggctcaagcctgtaatcacagcactttgggaggtcaaggcgggcagatcacctgaggtcgggagttcgagaccagcctgaccaacagagagaaaccccaggtctactaaaaatacaaaattagccgggcatggtgacgcatgcctgtaatcccagctactcgggagggtgaggcaggagaatcgcttgaactcaagaggtggaggttgtggtgagccgagatggcaccattgcactccagcctgggcaacaagagcgaaactcagtctcaaaaaaaaaaaaaaaaaaaaaaaaaaggatttaatgaatgaatgatgagaccgttggtgacatctcccaccttctccctctcactccactgcagccacacggggctcctcactgttcccgtagcagcaggcatgtgcccccacagggcctctgtactggctgttcccactgcccgaacaccctcatgcaccatctgcactgtccaatacggccgcctctggccacacatggctactgagcagttgaacatggctggtccaaaccaagatttccaagacgtcgtgtggtaaaaaaaacaacataaagttttgcaaaaatgtttctattgattatgttaaaattatgatgttttaggtatattaggttaaatcagctattttatcaaaatgaatctcgcctgtttgtttttgctttttttttttttttttttttttttgagatggagtctcgctctgtcgcccaggctagagtacaatggcgtggtctcagctcactgcatcactgcaacctctacctcccaggttcaagcgattctcctacctcaccctcccaagtggctgggattacaggcgtgtgccaccacacccagctaatttttgtatttttgtagagacagggtttcaccacgttggccaggctggtctcgaactgctgacctcgtgatctacctgcctcggcctcccaaagtcctgggattacaggtgtgggccactgcgccggccatgtttctcgacttctgctggcaagcatgttccagtatttgcatggctcctagccctcatctccatttctctgcacagatgttatcttccccatgaggtctgccttatacatgaggcgtgtattataaagtgcaactgccaattcgccaaccccgttgtttcttctctccagaacactaggcaccatctgatctcctatgccttttccttattgtcagatactgaactctcagatacagttccccttcctccctccagggggcgccatggaacgcagggccctcactggccctggggactgggtgacgtcaggggtgagcctctggtgattggctccctcaccctgcgtaagatcaaagggcctaaaggtcagccccgacacccggagccattgtggctccggccggttgcgcgggccctcggaccctcagagaggcgagggttcgagggcacgagttcgaggccaacctggtccacatgggttgaaaaaaaaatttttttatcgttcccaatataacaacaaaacataaagggaggacgtcttgataggaagaaatgacatcttcctaagtgtttttaaattacttcaatgtatctttcttttttttttttttttgggagaccgaggcttgctctgttgcccaggctggagtgcagtggtgtgatcttggctcactgcaacctctgcctcgtcggttcaagggagtctcctatctcagcctcctgagtagctgggattacagtcgcctgccaagagatggggtttcgccatgttgaccaggctggtcttgaacacctggcctcaaatgatccactcgccttggtctcccaaagtgctaggatgacaggcgtgagccaccgcgcccagcctcttctattcttttagagacagggtctcactctgttgcccaggctggagtgcattgatgtgatgtgtgatcatagctcattgcagccctgaccatccgagctcaagcaatccttctgcctcagcctcctgagtagctggggccgcagatgtgcaccactgcacctggctaatttttaacattttttgtggagccagagtctgtataaaataaagtgtaaatagtaccataaataaagaatacatagtaccattttatagtagtataaaacggacattagaaactctggacttaaagtttaaaaaaatacacaaaagtagttctcaagttctagagacttggagaatccaggaatcaacaatgtcgtggaactcctacagcctttcataaagaatggccctcgaggaaagtggaattgtcagtgggcattgtgttcgtgcctcagctaaacacggcaggaatttatttataacctagtgtaacatcctcgaggcactgttcaattagtcaagcaattgtaaaattctcccagtcttagaaaagatacaggtgtgtgtccctctgctgtggctgtgcactgacgcttcagtaaaagttgccgtctaaaaccaccggcctgcccttgaattgttttgttttgttttgttttgttttgttttgttttgtttttttgattcgcagcctcactctatcacccaggctggagtgcagtgacacgatctctgttcactgcaacctccgcctcccgggttcaagcgattcccctgcctcagcctcctgaacagctgggattacaggcacccgtccccatgcccgggtaatttttgtatatttagtagagatggggtttcaccatg[136 bp omitted]ggctaagcctcaattttggggctcgcctgtgctgcatcagcttcacacctagagaagagagtgaaagagaagggagagccgtccttttgggctgccttgaaataaaggttgacccatgggttcatgtattgtcattcattctcattttctcttcctctctttctctctctcccctgccccttaagttagcttttctacaccctacctggataaggataagaaatagaaggaggggacactttaggatgctacaaaataaaatacaacaacaacaacaataacagcagcagcaacaacaacaacagcaacaaaaggggaagaaacaaatctggccactgcacattcctccttgccaacaaaaagccgcggatgcaaaaagctgcccttcactgcatagacagaacagggcgcgctcgagctatgaatctcggaaattactcaaaccatcagcctctgcaagaagcaaagtggacggccgggcgcggtggctcactcctggaatcccagcactttgggagcccgaggtgggcggatcacgaggtcaggagatcgagactgttctggctaagccagtgaaaccccctctctactaaaaaaataacaaaagcgaagtgcatctcccataaacgaggtactgcaggaagaaagcagaaaatgagacccgagtacacacatgcacgcgggcgtgcgcacacacacaccagaagaaatgaaccaagaggaaaggaaatattttcaagtaagcatttggagatgggaaaaacaccttgaaacagaaattcataaagtacacacatgttttttttttaagttaaaagaggaacaataataaacaggcagaaaatgaataaaaaataaaatgtcatatcagaagtgaagataaattaaaagtggtcaaaggagaagagatctaaatgcaaacttaagaaggggcaatttttttttttttttttttgagacgcagcctcactctgtcgcccgggctggagtgcagtggcgtgatcttggctcactgaaacctctgcctcctggattcaagcgattctcctgcctcagcctcccaagtggctgggattacaggcatgagccaccatgcccggcctagagtcatcatggaaattaaacaacctgcttccaaatgacttttgggtaaagactgaaattaaggcagaaataaaaaaattatttgaaactaatgaaaacaaacatacaacatcccagaatctctgggacacagctagaacagtgctcagaggaagtttctagtgctatatggctacattaagaagctagaaagatctcaaatgaaccgcctaacatcacacctagaggaattagaaaaacaagagcaaatcaaccccaaagctagcagaagaaaaaaaaaaaacaaaatcagagctgagctgaatgaaattgagatgtaaaataccatacaaaagatcaatgaaacccaaagttgattttttaaaaaaattatttatttattatttattccataaattattggggtacaggtggtatgtggttacataagctctttagtggtgatttgtgattttggtgcacccatcacctgagcagtatacactaccccctatttgttgtcttttatccctcgccctcgccaactcgtccccctaagtccccaaagtccattgtatcattcttatgcctttgtgtcctcatagcttaggccccacatatcagtgagaacatacgatgtttggttttccattcctgagttacttcacttagaataatactctccggtctcatccaggtcactgcaaatgctgttaattcatacaaagttgatatttttggaagcataaataacatggaaagaccactagctagattaataaagaaaaaaagacaagatccaaataaacacaatcagaaatgacagaggtgacattaccactgacccacagacatacaagaaaccctgagactattccacatgcctctatgcacaaaaactagaaaactagaagaaatagagaaattcctggaaacataaaacctctcaagattgaaccaggaagaaatggaaaccctgaacaaaccaacgatgagttccaaaattgagttagtcatacaagacctaccaaccagcgcaaaaaaccttagactagacggattcacagtcgaattctaccagatgtgtaaagaaaagccggcaccaatcctactgaaattattccacacaattgaggaggagcaactgctctctaactcattctatgaggtcagagtcattctgataccgaaacctggcagagacacaacgaaaaaaggaaaataggtaaagtaatacatatgttaatgatcttgatttagccattctacggtatatacatatttcaaaacaatatgtacatgataaatatgtacaatttgtcaattaaaaatatataaaaggaagaggaaaaaattcaaatggcgtagaatttgaaaggagaagatacagaacaaactccagtgtcttctttattcaactatatatacacacgttcaatggaccgggagcagtggctcaagcctgtaatcacagcactttgggaggtcaaggcgggcagatcacctgaggtcgggagttcgagaccagcctgaccaacagagagaaaccccagctctactaaaaatacaaaattagccgggcatggtgacgcatgcctgtaatcccagctactcgggagggtgaggcaggagaatcgcttgaactcaagaggtggaggttgtggtgagccgagatggcaccattgcactccagcctgggcaacaagagcgaaactcagtctcaaaaaaaaaaaaaaaaaaaaaaaaaggatttaatgaatgaatgatgagaccgttggtgacatctcccaccttctccctctcactccactgcagccacacggggctcctcactgttcccgtagcagcaggcatgtgcccccacagggcctctgtactggctgttcccactgcccgaacaccctcatgcaccatctgcactgtccaatacggccgcctctggccacacatggctactgagcagttgaacatggctggtccaaaccaagatttccaagacgtcgtgtggtaaaaaaaacaacataaaattttgcaaaaatgtttctattgattatgttaaaattatgatgttttaggtatattaggttaaatcagctattttatcaaaatgaatctcgcctgtttgtttttgctttttttttttttttttttttttgagatggagtctcgctctgtcgcccaggctagagtacaatggcgtggtctcagctcactgcatcactgcaacctctacctcccaggttcaagcgattctcctacctcaccctcccaagtggctgggattaaaggcgtgtgccaccacacccagctaatttttgtatttttgtagagacagggtttcaccatgttggccaggctggtctcaaactgctgacctcgtgatctacctgcctcggcctcccaaagtcctgggattacaggtgtgggccactgcgccggccatgtttctcgacttctgctggcaagcatgttccagtatttgcatggctcctagccctcatctccatttctctgcacagatgttatcttccccatgaggtctgccttatacatgaggcctgtattataaagtgcaactgccaattcgccaaccccgttgtttcttctctccagaacactaggcaccatctgatctcctatgccttttccttattgtcagatactgaactctcagatacagttccccttcctccctccagggggcgccatggaacgcagggccctcactggccctggggactgggtgacgtcaggggtgagcctctggtgattggctccctcaccctgcgtaagatcaaagggcctaaaggtcagccccgacacccggagctattgtggctccggccggttgcgcgggccctcggaccctcagagaggcgagggttcgagggctcgagttcgaggccaacctggtccacatgggttgaaaaaaaaattttttttatcgttcccaatataacaacaaaacataaagggaggacgccttgataggaagaaatgacatcttcctaagtgtttttaaattacttcaatgtatctttctttttttttttttttttgggagaccgaggcttgctctgttgcccaggctggagtgcagtggtgtgatcttggctcactgcaacctctgcctcgtcggttcaagggagtctcctatctcagcctcctgagtagctgggattacagtcgcctgccaagagatggggtttcgccatgttgaccaggctggtcttgaacacctggcctcaaatgatccactcgccttggtctcccaaactggtaggatgacaggcgtgagccaccgcgcccagcctcttctattcttttagagacagcgtctcactctgttgcccaggctggagtgcattgatgtgatgtgtgatcatagctcattgcagccctgaccatccgagctcaagcaatccttctgcctcagcctcctgagtagctggggccgcagatgtgcaccactgcacctggctaatttttaacattttttgtggagccagagtctgtataaaataaagtgtaaatagtaccataaataaagaatacatagtaccattttatagtagtataaaacggacattagaaactctggacttaaagtttaaaaaaatacacaaaagtagttctcaagttctagagacttggagaatccaggaatcaacaatgtcgtggaactcctacagcctttcataaagaatggccctcgaggaaagtggaattgtcagtgggcattgtgttcgtgcctcagctaaacacggcaggaatttatttataacctagtgtaacatcctcgaggcactgttcaattattcaagcaattgtaaaattctcccagtcttagaaaagatacatgtgtgtgtccctctgctgtggctgtgcactgacgcttcagtaaaagttgccgtctaaaaccaccggcctgcccttgaattgttttgttttgttttgttttgttttgttttgtttttttgattcgcagcctcactctatcacccaggctggagtgcagtgacacgatctctgttcactgcaacctccgcctcccgggttcaagcgattcccctgcctcagcctcctgaacagctgggattacaggcacccgtccccatgcccgggtaatttttgtatatttagtagagatggggtttcaccatg[136 bp omitted]ggctaagcctcaattttggggctcgcctgtgctgcatcagcttcacacctagagaagagagtgaaagagaagggagagccgtccttttgggctgccttgaaataaaggttgacccatgggttcatgtattgtcattcattctcattttctcttcctctctttctctctctcccctgccccttaagttagcttttctacaccctacctggataaggataagaaatagaaggaggggacactttaggatgctacaaaataaaatacaacaacaacaacaataacagcagcagcaacaacaacaacagcaacaaaaggggaagaaacaaatctggccactgcacattcctccttggcaacaaaaagccgtggatgcaaaaagctgcccttcactgcatagacagaacagggcgcgctcgagctatgaatctcggaaattactcaaaccatcagcctctgcaagaagcaaagtggacggccgggcgcggtggctcactcctggaatcccagcactttgggagcccgaggtgggcggatcacgaggtcaggagatcgagactgttctggctaaaccagtgaaaccccctctctactaaaaaaataacaaaagcgaagtgcatctcccataaacgaggtactgcaggaagaaagcagaaaatgatacccgagtacatacatgcacgcgggcgtgcgcacacacacaccagaagaaatgaaccaagaggaaaggaaatattttcaagtaagcatttggagatgggaaaaacaccttgaaacagaaattcataaagtacacacatgttttttttttaagttaaaagaggaaccataataaacaggcagaaaatgaataaaaaataaaatgtcatatcagaagtgaagataaattaaaagtggtcaaaggagaagagatctaaatgcaaacttaagaaggggcaattttttttttttttttgagacgcagcctcactctgtcgcccgtgctggagtgcagtggcgtgatcttggctcactgaaacctctgcctcctggattcaagcgattctcctgcctcagcctcccaagtggctgggattacaggcatgagccaccatgcccggcctagagtcatcatggaaattaaacaacctacttccaaatgacttttgggtaaagactgaaattaaggcagaaataaaaaaattatttgaaactaatgaaaacaaacatacaacatcccagaatctctgggacacagctagaacagtgctcagaggaagtttctagtgctatatggctacattaagaagctagaaagatctcaaatgaaccgcctaacatcacacctagaggaattagaaaaacaagagcaaatcaaccccaaagctagcagaagaaaaaaaaaaaacaaaatcagagctgagctgaatgaaattgagatgtaaaataccatacaaaagatcaatgaaacccaaagttgattttttaaaaaaattatttatttattatttattccataaattattggggtacaggtggtatgtggttacataagctctttagtggtgatttgtgattttggtgcacccatcacctgagcagtatacactaccccctatttgttgtcttttatccctcgccctcgccaactcgtccccctaagtccccaaagtccattgcatcattcttacgcctttgtgtcctcatagcttaggtcccacatatcagtgagaatatacgatgtttggttttccattcctgagttacttcacttagaataatactctccggtctcatccaggtcactgcaaatgctgttaattcatacaaagttgatatttttggaagcataaataacacggaaagaccactagctagattaataaagaaaaaaagacaagatccaaacaaacacaatcagaaatgacaaaggtgacattaccactgacccacagacatacaagaaaccctgagactatttcgcatgcctctatgcacacaaactagaaaactagaagaaatagataaattcctggaaacataaaacctctcaagattgaaccaggaagaaatggaaaccctgaacaaaccaacgatgagttccaaaattgagttagtcatacaaaacctaccaaccagcacaaaaaaccttagactagacggattcacagtcgaatcctaccagatgtgtaaagaaaagccggcaccaatcctactgaaattattccacacaattgaggaagagcaactgctctctaactcattttatgaggtcagagtcattctgataccgaaacctggcagagacacaacgaaaaaagaaaaataggtaaagtaatacatatgttaatgatcttgatttagccattctacggtatatacatatttcaaaacaatatgtacctgataaatatgtacaatttgtcaattaaaaatatataaaaggaataggaaaaaattcaaatggcgcagaatttgaaaggagaagatacagaacaaactccagtgtcttctttattcaactaactgaagcacttatttaaataattaacttgtttaatttattttaattaagttaattatttaaattatttaaacaagtgttgaattgctttagtttctgctaattgttctaaataaacagacatagaatacaaaaatcacaaaatgtcagaataaaatttcttttcacaaacatacaacaaaaacttagcaataattaatgtagtaacatagactggtttggtgtcttacatgtgtgaagaacttgtgaacagaatttgattcctcagttgaatattggttctagaatttgaggatcattattcattctgagcaatcaaagtttaacctaaaattaaacagaaaaatatttaacttaaagctagtcccagaatagcacagctaacatcacactgaactgtgaaaccttttcctctaagatcaggaagaagacaaggatgtccacttttgccactactgtttaacagaatagtggaagcccttgccagagcaattaggcaagaaaaaatagtaagaggcaaccaaactggaaaggaagaaataaattatctctgttcacagaaaacatgatcttgtgtataggaaactctaaagattctacatacaaaatgtgttagaactaatacatgaattcagcaaagttgcaggatatgaaatcaactcataaaaatcagttgcatttatatactaacaacgaagaatccaaaaaagaaacaattccatttataataacaccaaaacctcccaaagcttaggaataaatttaaccaaggaggtaaaagacttgaagttaaataagatataaataaattaaaagacattccgtgttcatggactggaagatttaatactattaagatgtcagtatggacccaaagcaatctaccaattcaatgcaattcctacaaaagttataaaggttctttgctttgttttgttttcgcagaaatagacaaatctatcctaaaattcatacggaatctcaagagactcagaatagccaaaacaggctgggcatggtggctcataccatgtaatcccagcactttgggaggctgaggcaggcagatcacctgaggtcaggagttcaaaatcagtctagccaacacggtgaaaccctgtctctaccaaaaatacaaaaattagccaggcatggtggcacatgcttgtagtcccagctacttgggaggctgaggcaggataattgcttgaatccaggagacagaggttgcagtgagctgagatggcgccactgcactccagcctgggtgacagagtaagactttgtctaaaacaaacaaaaaaatgaataggcaaaacaatcttgaaaaataagaacaaagttggaggcttcacatttcctaatttcaaaacttaatacaaaaccacagtaattaaaacagtgcggcgctggcataaagacagccacatagaccaatggaatagaatacattgaaattttctaaaggacaattttttcaatttccaacttttatgtggtttaacattcgtaagcaagtttgtgttctttgaatcactgagagcttttgagcatgtagcaatatcctgcacaaattttgcatgagtgtgttaaagacgggtaagtattaaatgtctcatgcagccggatgcagtgactcacacctataaccccagcactttgggaggccaaggcaggtggatgagttgaggtcaggagttcgagaccagcctggccaacatggtgaaaccccgtctctgttaagaatacaaaaattagctggatgtggtggtgggggcctgtaatcccaggtacttgggagtctgaggcaggggaatcacttgaatccgggaggcagaggttgcagtgagccgagattgcaccaccgcactccagcttgggtgacagagcaagactccgactcaaaaaaaaaaaaaaaaggtctcatggaggaagtcagttctgtagaatgaccccactgcaagatgctcttccagtgccaggaagtggattatgttctaggagccatgaaggagagtttacagaagcccattctccgcttcatcatcattgtaacacaatgaaagctgatgacatggctgcttggctacactgtgtttatcagcttctcctgcatttagaatgggggcatgtaactacacactctaagtaggtgcttacccaggtccagagtctccaggaataagatcaatgtagaagagcagctacagaaggagtcggttgacttgaatgacataaaaataaatcatggtaattgcttaagcctcagcattttttttgtactgtcccatttagataaatgaatagagtttgacaacagtctttcatgtctttgttggtgccaccaagctctgaaattcccaaggaacataatgtttcttcacgcgctccattctcgtaggaggctaactacgatgacgtgcaatgtgacttttccctatcttaatagctgggcccaagggtctgggaaccgatgtgagtcatacgcctttctgaaaatatttttttcaaactgtattactcctgggccctgcggaaatcattgcagaaagtatttggtatcacactgagctaacagagaagtgaacctaactcaggactctgtctcatgttcctataatcttccactctaatcactggatatcagtggtattcctagtccttgaaaactaatctttgctcaaaaccagtattcagtaggctctggaaagtttatgtatttacctttgtaatttctttctttctttctttctttctttctttctttctttctttctttctttcttttttctttctttctttcttttttctttctttctttctttctttcttttttttctgagagactagagtttcgctctagtctctcacgctggagtgcaatggcgcgatctcagttcactgcaacctccgcctcccaggctcaagcgattctcctgcctcagcctcccgagtagctgggattacaggaatgcgccaccatgctcagctaatttttgtatttttagtagagatggggtttca[143 bp omitted]agtgcctggttacccagccttgccttcactcaaggggcattgagttggtgaactgtcttgtgcctggaactgggagaaaagccatgactctagcgcg[132 bp omitted]ccgccccctcccgggttcaagcaattcccctgcctcagcctcccaagttgctggggctacaggtgtgtgccaccatgccaggctaattttttgtattttagtagagacggg[136 bp omitted]tgaattcatttctgaaaaaaacctatgattatcaccaccagatgtcgctcttgcaccagccattctctatgatctgattagtaattataccctgttgcctggtatcactttgcttcttagggattaattgccaccacctgggctcaatcacaccaggctctgcctgtctccactggaaccctgaagctcacttcaaaaagcatggctttctgctagcattcctagagcggaaaagcaagtcagccatattctttacaaaagatttcctatgctttgtgaaagattaagatgagatttatgggttcacaaagacaatgtttccgtttttttaaccataatctatagaaagaatagactttaaaatatgagctgacttctatctatccatcatctatatctttctatttaggcatccctatctatctatacaatctctaaacctttttagaaataactcatgccatacacatgaaacactctgtgtttttccatccacgtttgcagtatttttaatttaaacaatgctggttgtgctttgataaatggaagattatgactcaccatttgaaaagagctggcctaagtgtgtgtctttcttttcttttcttttcttttcttttcttttcttttcttttcttttcttttcttttcttttctttctttttttgatggagtctcactctgtcgcccaggctggagtgcagtgttgctatctcggctcgctgcagcctcagcctcccggattcaagcgatcctcctgcctcagcctcctgagtagctgggattacaggcgcctgccaccacacctggctaatttttgtattgttagtagagatggggtttcaccatgctggccgggctggtctcaaactcctgacctcaggtgatccacccgccttggcctcccagtgttgggattacaggcttggaccaccgtgcctggccctaagtgttttctaacataagcatggataggtttaagagtggagggtgggcgtttgtgtgtgtgtgtgtgtgtgtgtgtgtgtgtttgtgtgtgtgtgtgtgtgtggtcacagggcctctggacattgccatcccccttcacctctgcacctgcctaattgtcattaaactatcgggacccagcctggttgttgtcccttgtcccttcctagaagtgatccctgatcctgcaggctgagcaagggtcccgttctctggcctcctcttacccctggagtctctggtttttttttttttaaattagttaattaattaatgtatttttgagacggagtttcactctgtctcccaggctggagtgcagtggtgcaatctcagctcactgcaacctccacctcccgggttcaagtgattctcctgcctcagcctcctgagtagctgggattacaggcaggcaccaccacacccagctaatttttgtatttttagtagagacagggtttcgccatgttggccaggctggtctcgaactgctgacctcaggcgatccacctgcctcagcttcccaaagtgctgggattacaggcattagctgctgtgcccaggcatatactcactgttttcttggccattcatgaacacgtgaacagcagggaagaactggagttgttcaatgccctcatgccctgctgaggttgaacaaggtgatgctccaccttcttgtttcggctttcagtgtatacaagggtccttcaggctgggcgtggtggttcacaactgtgatcccagcactttgggatgccgacacgggcggatcacctgaggtcgggagttcgagaccagcctgaccaacatggggaaacctcgtctctactaaaaaatacaaaattagctgagtgtagtggtgcatgcctgtagtcccagctatttggaaggctgaggcagcagaattgcttgaacccgggaggcggaggttgcagtgagctgatatctcgccattgcactccagcctgggcaacaagagtgaaactctgtctcaaaaccaaccaaccaaccaaccaacaaacaaaacacacacacacacacacaaacaaaacaaaaaataaacaagtgtccttgtgatctatttagtctcatgtttttcccatttttgtattttttcttggcgatgtcactgtttaaatgactcccaagtgtagtcctaaaagcaaggggttatggcgcaccttatggagaaaatatgtgtattagagaagcttcattcagacctgcattcagccctgttggtcttgagttcagtgctaatgaatcgacattatgtattaaatgaaacatctttaaacagaaacacatataaaagaaggttatgtattagtcagttaacaaaaacattgtgaccagaggctctcaagaaactaaccttctatttcccctaaaagcaccagctcggtattcactaattcagtgtacatggctactttctagaacacatttaccacatacagcaagaattgactgcatcagcttattttagattcacaaagacctatgagacttctatctccactttacagatgaggaaactgagtcttaagagagatcaagaaacttgcccttcatcaatgatgcagcctggatagcaa[142 bp omitted]ccatctttactgaaaatacaaaaattagctgggcgtggtggcatgtgcctatagtcctagctacttgggaggctgaggcagaacaatcgcttgaacccaggaggcggaggttgcagtgagccgagatcacgccacagcactctagcctgggctacagaatgagactctgtcaaaaaacaaaaacaaaaaacaaaacaaaataaacaaaaaaacttaaggaagctcacaaagctcataggtgtttagaaaataaacgtcctctgccacgttaaaaaaaaaaaaaaaaggtatactggcagctggagtaggagacaacctgcaggggaagtacctgagcatactgttctcttcttgggatgtacgaatggggtcgatcaaggggactcgagctggggtacacactgaggtcaccaggggagctttatttagaaggtgtgatgcctgggcgccaccctaggactttctgaatgaattgatatgggcagcatactggccatggagactttttaaagttctaccgttgaatgtaaactagatcaaagttcagaagcactggggccaggcacggtggctcatgcctataatcccagcactttgggaggctgaggcgggcagatcacttgaggtcaggagttcgagaccagcctggccaacatagtgaaaccctgtgtctactaaaaatacaaaaaaattagcctggcacggtggtgcacccctgtaatcccagctactcgggatgctgaggtgggaggactgcttgaacttgggagttagaggctgcagtgacccgagatcatgccactgcgctccagcctgggtgatagagtgagactccatctcaaaagaaaaaaaaagaaaaaaaaaaaagcactgggataagcctagggctcaagagaccaggcatttcatttctttctttctttttttgactcgatggatgtttaatgatttaaaatttaatttaacttaattttagattcaggggatacgtgtgcaggtttgtgacatagatatattgcatgatgctgagatttgggcttcaatggatgccgtcacccaaatagtgaacatagcaccccacaggtaatttttcaaccctttcctcgcaccttccccccgcttttggggtcccctgtgtctattgttcccatcttttatgttcatgaggtttgtttagcaacctcttataagtgaaaacacgcagtatttggttttctgtttctgcattaattcacttagatggcctccagctgcaattatgttgctgcaaaggatacgatttcattctttgttataggagactggccatttctagtaagctgcatgctgctgtcttctttctcctttgtcttctgtattagtttgctggggctgccataaaaaagtaacacagatggggtggcttaaacgacagagatttattttctcactgttctggagggtagaagtacaggatcaaggtgacatcaaggttggtttcctcaaagcgtctctccttgccttgcagatggccacccccttagtcctcacaagggctcccctctgtgcacacacatccctggcatctctctgtctgtccaaattttctcttcttataaggacaccagtcatattggattagtgcctactctgaatacctcatcttagcttaattgcctctctaaacaccctttctccaaaaacagttgcattccgaggtcctgggggttggggcttcaacatatgaattttggaaaggacacagttcagcccataacaacatctctagccaattctgaggtattgtttgaacattacagcctacttccatctgtgttgcttggaaatagaagttatatgtcaacccatagaaaggatattgaaggggaagtcattgattcctgtggccaccatgttggtaggaaccacagtgaatgtgaggtgcccgaaggaagatgcatcttagtggatggatgcctggactctgatgtccactcatcactctccctgcaaagatttcccttttgctagaaatgctggagaaaaagagttttattttattaagaaaattgggggttactgtatatcagaccattctgacctgctgaagaatccatggctttcaggaagaagattattactgctggatgcatcgatcatgttttgtctgtatctgatagccagcagatgcaagcaaacctaacccaaagaacagaagcagaaatcagaaagcagacacagattgccccaacatttcctgctcattctctgccaggtactaaaacatctgatctggagtctgtggagacacacatcttttctgcatataaaatcagtctctctctcttttttcttttttttttttttttgagacagagtatctgtctcccacactggaatgtagtgctgcaatctcagctcattgcaacctctgcttcccgcgttcaaatgattctcctgcctcagcctcctgtgtagctggaactgcaggcacgttccaccatgcccagctaatttttgtggcctcagctacttaggaggctgaggtgggaggatgacttgagcttaggagtttgaggctgcagtgagctatgatggcaccactgcactgcagtggcatgatcataactcactgcactccagcctgagtgacagagcaagaccctgtcttaaaaaaaaaaaaaaaaaaaaaagaaatcactgatggaccaggcacagtggctcatgcctataatcccagcactttgggaggctgaggtgggcggattgtctgagctcaggagctcatgaccaacctgggcaacactgtgaaaccccgtctctactaaaatacaaaaaattagttgggcatggtggcgtgcacctgtagtcccagctactcaagaggctgaggcaggagaattgcttgaacatgggaggcggaggttgcagtgagccgagatcacaccattgcactccagcctgggcgacagagcgagaccctatctcagattaaaaaaaaaaaaaaaaaaagaaatcactgacggctgcctggagggtggattttaggaggatgtgagtggtaacagtaaaagtagcctggagactattgttgttggggctggtgctggtgacaccagtgcacctgcagacaagtagatggatttggcacgttttttgaagacagtcttggtaaaacttgtaaattagttggacgtggtagacatgggaaagagaagagtaaaaacagactcttaggtttggggctgggcaaatgggtggatggtcatgagatgggaagattatcagagttcctggcctggggatatgaagcagaattgagattctattttgttttgcatgattattcaacatccaagtaaacagatcctttatccagtttgatatatgcttttggggtttaggagataactcaggactggaaatagaaatttgtgtgtcaatgatgtatgggggatattcaagtcatgaggctttataagattcctgtgtcattcaggattcagtcaggagacagaaacgacacctgtaattcaaatggagaaaaatgtaatataaggatatattataaatggtgaaagggtattaactagaagggataaagagaatcttaagaaccctaaggaacagcagattgtaggaagaagccactacctgtaaggcagggagagggggagagagagagagagagagagagagagagagagagagagagactttagaatgtatgtgtgtgtgtgagagagagagactttagaatttatttgtgtgtgtgtgtgagagagacttcagaatttatttgtgtgtgtgtgagagagagactttagaatttatgtttgtgtaagagacagagagagactttagaatttatttttgtgtgtgtgagagagagactttagaatttatgtttgtgagagagagactttagaatttatgtttctgagagagacttttagaatttatgtttgtgagagagagactttagaatttatgtttgtgtgtgtgtgagagagagagagagactttagaatttatttttgttttattttatttttattttatttttgagatggagtctcactctgtcactcaggctggagtgcagtggcacgatcttggctcactgcaacctccgcctcctgggttcaagtggttctcctacctcagcctctggagtagctgagatcacaagtgcgcactaacacacccagctaattttcgtatttttagtagagactgggcttcaccatgttgtccaggctggtctcaaactcctgacctcaagtgatccacctacgtcagcctcccgaagtgctgggatcacaggcatgaacgactgcgcctggtcaactttagaatttatgagaccagtgtcttattcttctctttttcagatatgtgggttggttgttgttatcctatttctgtcccaacattgtatcatgatatgttggggaaaaggactaaaatgtgtatttttagttcagaagtctccaaataaggatagtacaaaggttgacttgatgcggatcgcaagatcctaatgctgtgtcccgatgagatttgggcactcttgggatgttggctagattgacttgcatgtggaataaacatgaataatagtgatgaacaggtgggctgtgattattttggttattgtttaccaaatacccttctcctcttcctaccatgagcagaatttacttccctgtcctattaatagtggacctgttcatgtgccgtgatgtggcaatgggatgttagcaggatggatacaagcggtcattttaaatgtgtttcttcagtctttgtgcttctgcctttagtcatgagaagaggatggctcaggtagtcgctccttatgggaggatgaaaaatctgcatctcagagccgaactaagcctaaatcagacaaatcctagctgacccatgaatgcatggttacaaaaataatgcttattattttgagggtggtttgttatgcagcagcattgtgaatagctaactgatacagggagaaaaatatggtggtggcaccaatggattcagcagtggcaacttcctgacttctgaaccacagccatggtgttgggatctctaaagcattatcactgggaccgtccctgctttggctcttcctacctttccagcgattttgtgagccactaattctctgtattttatcgtttaattaattaattaattatttttgagatggggtcttgctctatcttccaggctggagtgcagtggcatgatctctcggctcactgcaacttccgccttttgggttcgagcgattctcctgcctcagcctccggagtagctgggattacaggcgcatgccaccaagcccagctagttttcgtatttttagtagagatggggtttcaccatgttggccaggctggtctcgaatttctgacctcaggtgatctgcccgcctcggcctcccaaagtgctgggatgacaggcgtgaggcaccgcacccagcctgtattctgtcttttaaaataaagagattttattgtctgcacagactcatcaaaggtcttctttgaccgaatccctctcattttttatagtatagccatatttctcttgttctagtcctcaatatgccacacctgttcctgcattaggaactttgacttgatgttctcactgtccccagataacctttcactggatcttcacatagctggcctaccaatctgaaacagactgtctgtcacttaatattttattgccctaatttttagcatagcatccattcatactaaattccttctttattaattgagagcactcctaagaacacgcgtcttgttttattgtgcaagaaggagatttataataacattaatatctgttaccaatgtgtcttgttcattgtcaaagccttggaaatataatttgaataaaaaggttttggaatactgaaaagtctttagaaatttttgttctgtcctatgttcatagtctttgaagaaaaagttattctgactgtttttcatacttgttcatctgcttcgctggttgtaattgatgtctctgcattcctaaacaagataaatacctggggtttgctctattaaatcggaagataattggcactttcctcgtcttcaacatgtgtaaacggtgagtggaatctaaaatctgctagatttcacaatttaacaagggagtggtgttgaaagtcttacctcattgaggttggcagactgaatgcttgattccagttgtcccatgctaaccttgatattcttttttttttttttttttaacttttaggttcaggatacatgtgcaggtttattatacaggtaaattgtgtgtcacagggctttggcgcacatattatttcatcaccaacataataaacatagtgctttataggtaatttttgtatcatctccctcctcccactctccaccatccagtgggccctggtgtctgttgtccttttcttttctccatgtgttctcaatgctcagctcccacttataagtgacagcatgcagtatttggtattctgttcctgcattagtttgcttataaccttgatatagttacgtgaaccaaatatcttactgtattctttaaggtagttatatagagctggattttaaatagaaattggaaatagaaaattcttcacaatggttacctcggatgtgtggaattagaatattgaagctgaggtggagagagtgtttattttaatatattaaaatagcatagtatttctttttaatgtaatttttaaaaaattaaaaaattcccagttttatttccttcctatatatgcgtgtgtgtgtgtgtgtatacccacacacacatccccacccccacccccacacgtacgtaattgagagca[187 bp omitted]gtggcgggcgcctgtagtcccagcttctcgggaggctgaggcaggagaatggtgtgaacctgggaggcggagcttgcagtgagccgagatcgcgccactgcactccagcctgggtgtcagagcgagactccgtctcaaaataataataataataataataataataataataataataataatgtaggcagtaacatgccagagacagtagtttttacatgattctgtgtttttcataaaagatttggaatattttactcacttctagggaacagtctcctgtcattttattggtaccatctcatcaatcaccagcacgctcaattaattcattttaggacaactcatccatctctgtggtccttccacctccatggggatccatatgtgtgcacacaaacacatacacttttcattcataacgacaataaaaagtacagctcccattttattctgcaaatattttgaggttaagagaaaggggaagctggttgaaattctggttcaacatttgagagttgctggttgctacaacagttggttgttgagagattggacccttcctttcagccagaaaagaaagataatgtttgcctggatattattgggtattacaagagaaataagcaagccaagtacacgcggggagggcgccatcttgttcttgttcccgccactgctctgacgcagcaagaagaagtcaaaatcagttggagcttccaatctactgagcctctacctgcttctcctttcattcactgccatcttttctttgctgtttgttcacttctggctccacgtttatccttatgatctttcttttgcacatactctatccttagcactctgttcttctcccacacccaccaaacacccacttggaaataaacccaaacatcgcccttctcagtgtgatcccatgagcaggtatagctgtggtgaaatctcataatttagtttggtgggattacaaactcatgttccccagccatgctgagtgctatctgcatgcacctcccggctctctctccacccctcattctgctctgagctcctttccctttgctttctacttgggcttgaccaatgggatgcactggcaggagattaaagggaagaaggttgaggtattaattcccttggctcccatggattggtcacttccacagccactttctctctctctctcttttttttttttttttttgagatggagtcttgctctgtcacccaggctggagtgcaatggcacgatctcggctcaatgcaacctccacctcccgggttcaagcgattctcctgcctcagcctcccaagtagctgggattataggtgccggccaccacgcctggctaactgttgtatttttagtagagacagggtttcgccgtgttg[133 bp omitted]cattctctcctattctgtctctcgcttgctctccatctctgtcctttttcttcctcccttgctctcccacgctctcaattccaggaatttctcttcccctcactgtttaggtattgctcttactatccctgaatactgcactattatctatagtttccagtttcctctaactacccaatttgagcgtgcagtaagcttcctgactgacgcattaacctcaaccaaaccccctacactagccagacgtcttccaacatttctctggtcacctcactctccactctcttcaatgaccatgacacacctaccccactatacccatccctctcattgtcacaagattacttttcctactactttcctgataaaatacaattaaaaaaaactctctcacatatgaatcccctcaaatctacaaatctgcttatatccacatgcacttacattttcttatacctcgtaacaatggaagaccagtttctaccgaaggtgactccactccctcctcctgggatcatcccatctcttccttttttctctgggccttctatcagatatttcctctctactattctttgttatttcctttcatgtttttttccttttgagatgaggtcttgctatgttgcccaggctagtctcgaactccagggctcaagcaatccttctgcctctgcctcccaaagtgctgggattacaggcgtcagccaccgctcctggcctctataatcaaattggattgtatccagattctgcttaccgaacgatgctctgtggcttctctttggacttagccagctctcaagtgctggcttgcccactgcctggctcccagggcactcaccatggaccagccccagtggctttccctcactttgtacagcgcacccatctttgttgcccttgttcgtgtggttcatatctgaccctttttaaacctcactctggtactttatctccacacctgtattcctacctcaggtatcacctcagttatcactttttttctgttttagaaatattctttattaaggtaatgcattttttttttttttttttttttttgagacggagtctcgctctgacacccaggctggagtgcagtggtgcgatctcggctcactgcaagctccgcctcccgtgttcacgccattctcctgcctcagcctcctgagtagctgggactacaggcacccgccaccacgcccggct[175 bp omitted]tttaagtcacagaaaaattgagtagtaggtataaaaatttccatgtacacatagccactgtgttatcaatatcctccaccagagtggaacatttgttgcaattgatgaatctacattgacacatcactatcacccaaaatccataagcttattttacttcatttattttattttagaggtgggtctctctttcatcacaactcaatgcaaccttgaactcttgaactcaggtgattctcctgcctcagcttcccgagtagctgagactacaagtgtgtgccaccatgcctagttacatttttaaattttttcttttgtagaaacggggtcttgctatgttggtccaggctggtcttgaactcctggcctcaagcagtccttcctttttggcctcccaaagcgctgggattatgggcataagccaccacgcctaccccatagacttaatttttaaaagggactaattttacacagttagcaattaaagtgctgaggctaaactacagatttccatattaaaaccccataatcctgaatcgaaaacctctagttatttatagttagatcaccttcaactcacatcccagaaaaaaaaaaaaaacaaaaaaaaaccctctctaatgagaaagggttctcctctgccaacaaaaactctaggttctttccaaggagaatgattaaacgtcttcatccccctcccctggtaaatctcaccatcattcacagtatttccaaattcggtccttgttaaaattcttggtcagtgaacaccattttttcccaaatgcttccccatcatcagtacactcccagtagatcaagcgtctgtaccagaagggaaatacacagtttgcaaaatctgcagaggaggaagaggaagaagcagagtaagaaacctttctaatttgcacccacctccaccacaccatgcacacacatgcacacatatgcacacatgtgcatgcacgtgaacaaatgtgcacacatacacatgcacactcacacagacatacatgtatgcacactggtgcgctcacacacacacgcgcaaatacacacttttgcttcctattcagtatcatctgctctgccctatttcaccaaaggcacatgggaacaatattggtgggggattcagatcccacatcactttgctgttctattaaaaagattcttttcaaaataatgtggttgaaatgctcataacatatctatggtgcaatgtgatttttatatcgtcagaaatcgaacatcctttattttcacaacttaattggctatggattctattttcagaaccctcttgtgttttgcctcagatcccagcctcagagaccaagattactgctctgaggtatttagagacaggacactcaccttctgcactgcaaaacttccagtatccttcgtaggtcttgtttaacgagcaccacttgtgtcttgccttggacttgatgcagtcataatatgttccatttttatagtggaatggaaagacacactccccatctagagaaaacaaaattcttcctctgtttctgggtgtgttaggagagaggttatcaagcgactgtcttcctaggcgctgttgccctttgaaatcagagtcattggctgtggctgtagtaaatgttattgtgctactcaatagcagagctttggctctctaatgacaaagctcttttgttttatattcctgcccctgccctacttcttttccaggttataaacagtctcaaaattttgcttagcatttgccccagtttcagaaatctctcctaagcgtagaaatataaatgtgggcatttatctacccaacaattcttcccccctgcccctggatctcttatttttacctctttccgtcatctctctttctctccctctcccatgcaactatacatgtgtgtatgtgtgtcacctgggtatatctgtgttgtatggttttatatatatacttatatatgttatatggttttgtatatatgctgtatggttaatacaggatatatatatatatatatatatatatatagttataggtgcatacacacatacaggcacacatacataattttttgctacccttcaaaatgaatcatattttatacttgagtttccgacttaacacatcacagaaatcttcttaaagtgattgtgtagccctaacttcttcatggttcactgcagccttatcctcctgggctcaagcaatcctcccacctcaacctctggagtagctgggactgcaggtgcgtgctaccatgcccagttaatttttaaattttttgtagagatgagatctcactatgttggccagggtggtctcaaactcctgagctcaagcatcttcctgcctcggcttccaaaaatgctgggattacagtcatgagccactgagtccggccttaacttctttctaatgctgattcatgttctgtgatatggattcaacacaatttattcagtatttccacattcagatttttcctactgtaaatacagctgtagtaaacatttcacatatttaagtccttatgtattgaagcatttgtttctatagaatccccaaagcaaggttgcaaggacacaatgtatatacaattttaacattgatgaatattgctttgtcaaaggaaaatggcaattagtctttcccaccaattgtgctcctttacctgaattttcattagcacgaagcatttacacactttaaaaatgtttacctgtattacagaagatttctgccttgctttaaaagatctactggtctttaggccatacatatattttccattttcttcttaaattaaacaattttgttccttttacatttaaaatttgattaagctagaatttagttttgtatatgatgccaaagggcaatgcaactttattttctttcaaacatatttagtaatgacagatcgatgatgaaataaatcacctgtacatttaaacaatcatgtttaaaaccatggattattctaatatatcctgggatccattctatattttctataaagtttcttgaaattattagagaggtaaggaagcatggtggtaaaatgagcaggctctggagccagcaagcatcacaaaatatttcttcttttcttctctcctcttccttctcctcctccttcttcttcttcctcttcttcttccttcctccctcctcctcctcctcttccatttttctaggctgattccatgttgcttatattacaatattttagtatgtctacatatctgatgagacaaaatatttctctactacagcactttgttcatacttctaattattattggatgtttttctatataaattttaaaatctattatttcctgttagattggcagaaattaaagagtagacacatttagtgctgatgaaagttcagagtgacttctatacctctgttttctttatctgtttatgaggcacttatgttacattttatataaggagaaaaaatgattttttttactggaaaaacattactgatttcctcacttttacaaaattaaaagaaaatatacattaataatcaaagttttctgatcgacttacctgtaacttctggaaaatgagttatagtttctgaaaaataaaatttagagctgacatttatttcactattattaggctttaaaatgggctcttacgtaaaataaaattaaataaaaatgttagtttaggaaaaagtgatattgttatggcattatgttttccatccaagaacatggcatctgctctttttcaaaatgtatttttttgctcttcaatatgattttcttatttattctatataaatcctacacatttctcacaaatttaattccaaagtgcttttttttggtcactgatgttaaacagaatgttttccatttccatcaatgtccagttggttcttatcagtatagagaaaaactattgactgttgtatgtttatcttgcatccagccacatagccatattactttattaaaactaataatttttattcatgttcttagggatttaaggtatacaatcataaaataattttgcctgttattttatatagagtttgtcctttctacaatatcacttatgttagaacctaaaatagtgttaatgtaacacccctgtgctttcctagttttaattggtatgacacttagattaagaatgtttatttcagcatgattagtattagattaaaaataataattaaaaaatattcatccctgagggaattttaaaatgaaattggctttataatatcaagtaggcattaataaagatgagtatataaatagatacggaaaaatttgtacttcatttttaggtggcaaaaggcattttctatttccttcttttccagaatacttgatttttgctaaaaatcacattatgaagttacatgtaatgacatgtttaatcacccaaaagtaaaattaacagtaaaattatgatttatctcctcttcttctttctttttttttttttttttttttgagactgtcacccaggctggagtgcagtggcgtgatctcggctcactgcaagctccgcctcctaggttcacgccattctcttgcctcagcctcgggagtagctgggactacaggcgcccgccacca[138 bp omitted]atttttaacatgaaatttactttatatataagtacataaaatagtaatctttaatgaaaagtatgatttcttaccaggaaagggaatactcaatggtttcacattttattgcaaaaatttgaaaagaaacgctaataaaagttttttgatcaactcacccacagttgatgataattcatctgaaaaacacaattttgaacaaatatttatgtcactttaaaataaaagagatgaaaggatttcaccaatttctattctagtaagaataatactattttgaaagttagacatcaaagttcaatagagcttatttttagtagtgtgattgtgggtgatttcttactttccttttgctttaattgtatttttcaaatattattaaaggataggaatgattaaaattatttttaaaacaaaaaattcagcaggcaaaggaaatgatttacttttctcacatttttctataaaataaaccacttcatcataggtttctgatatgaacactataggtttttatttctgtcaccacttctcactgaatacctgaattctactattagagattcatgtctttggagttgccactttcaaaatggaaacctcttcctctaggagggaaaaataagaatgatacctctgaggtatgtaggaaatgcaaataaatgctctgaacgtcttctctatcctgggcactatattttatttaacttatcagaacaattttgtgaggcaggcattgtttccatcatcttagagataaagttcagaaatgttaggttccattaaattaaaaaagttaagcatatggcaattcaatttgaatccccccggaggggttggttcagtaggaagtaacggcccaaaccctggcacaggctcaaccacttaccaaccatctgccctcagtttactctgctgtaaaatggagagagaacattaggatgtcaagtcctccccagtttgaatatcctaatattcttggaatgaaggaaactgcctgatagctttactttttttttttcttaaagcagcatttttcaaccattgttccttcatgagccattcaacctgtaatatttacctccccctccttagaacttgaattttttgttttgttactttgcatggttcctgatgaagtgattttaggcaaaggctatttgatttaaaaccagcatgttttagttaaatattacataactgttacaaagttcatttaattgaggctttaagaacagtcataactttaggatgaaatacaacatagaatgaattgtagaataaatatagagtgaaaaatttgattttttcccaaatagcccgtaatagatgatgcttaataaccattaagatgatgtcagatagaaaagcacaatttaccaacaagtaaatttacaaatgtcatgtttggttaagagaacatccacgtattataatgtaattagcagatatctctcatattaaagcattataactcgacatattctgtgttcataactagttcatcaaatttgtggattacacttgaaagagcaatgacttaattttttattttttgaaaagatttttgcaaaagcaatgattttaattctgaatttgttgtgtatatttcatttattactgacgattttgctatttgctcgtgtttattcattccacaagtttgtttttcagctaaattgtcctggctgccattgtggcttgaaattaaaacgtttttccttaggcacatcttatttaagaaatagtcataatggaccagcacaatggttcacaagctttgttgcatattagaatcaccagctgagtttttaaaaacccagatcccttccacttctgggtatatatacaaaataattgaaagcagagactcaaacaaatatttgtaaacccatgttcatggtagcattattcataatagccaaaaggtggaaagaacccacatgtccgtgagcaaatgagtaaataaagaaaatatggtagacacatacaatggagtattattcagcattaaaaaggaacaaaatttgaatagatgccaccacatggatgcactttgaaaatactaggttaagtaaaataagccagacacaaaaagacaaatattatatgattctacttatatgaggtaactagaatagtcaaatacatagagacaaaaagcagaatggtggttgttaggagctggagggagggaggaatggggagttattatttaatgggtgcagagtttcagtttgggacaatgaaaaggctctggagatagattgcacaatttgaatgcattgaatgccactgaactgtgcactggttccagtatatagggaagatctcacgatgaagggatctgcatttattcagccagtccatcaacccactcatgtagacaacaaatatggattgaatgcctactatgtgcccagcctagtgctaggttctgggctacccaaaaagggagtggctgaaatggtagactctggactacagaaaccatgagattcaggtgggaatccaagatcaatggactcatcaggagttaagcttgtctttctctgaaatatggggattataattgtttctacttcctggatttgttgggttcattcagtatgcattccatagtgaaactattaggaaatggattttggttttgaggatcatgataggcctgatttcatgaatggggagatacagacgagtgattccaacatagcctgtctgctaagcactatgatcttagaacaggtatcaccaggtaagcatcagaatgcaacatccccatatcataaacacagtgcaccatcctcggtgctataaaattatgagtccccactcaaacgtcccactctgattaacaccagaaattctgccatccacctggtggatcatttgttgtgaatgttgggatgttatgtttcaaaaaataccttgcaagtacaatgcaactgcaaagcaagtggactacaaaatgaagccggtcactttgtgaaagatgcaagaatgtatgaatttaatgacagtgatacaacaaagttaaaaagagcacatattgtaactccataagggctttgaagagaaatttttttttttttgacacggagtctcactctgtcacccaggctggagtgtagtggcacgatctcggctcactgcaacctctgcctcctgggttccagggagtcttctgcctctgcctcccaagtagctgggactacaggtgtgcaccaccacctgtatttttacttggctaattcttgtatttttagtagagacagggttttg[131 bp omitted]atataatataaatatatataatatgtatattatacataaaatataaatatatatattatatatttttaaattcaaaggattaagaagggcccctaaaaattaatatagtcctagaattagtcttagaatacttatacaaaactggctttctttatgaccctttgaggaaagtgtagaatggaagaagacaaagctatgcactggaaaatcgtaacaattttgtcaggaaagtcctgcatcccaattcttttcattctcaagaattcacctttggtcataattcaagctaaattctgttataatatataaggttttaaaaatacccttatttgaaataaaaatgagtctcattttttcagttaaacccaaatcgaaattgttttatgcagccataacaaagaacaaaatcatgtcctttttagcaacatggatgcagctggaggccattagcctaagcaaattagtgcagaaacagaaaaccaaataccacatgttctcacttataagtgggaactaaacattgggtgcacagggacacaaagatgggaacaataggcactggggattacaaaagtggggaggtaaggaggggacccaggcttggaaaccaactattgatggccgggtgcagtggctcatgcctgtaatcccagcactttgggaagctgaggtggactgatcatgaggtcaggagttcaagaccagcctggccaacatgatgaaatcccgtctctactaaaaattagccggacatggtggtgggcgcctgtaatcccagctactcaggaggctgaggcaggagaatcgcttgaacctgggaggcagaggttgcagtgagccaagatcgcaccactgcactccagtctgggcaatacaagactctgtctgaaaaaaaaaaaaaaagaaagaaaaagaaaaagaaaactgcctactgggcactatgttcattatttgggtaatggcttcaattgaatcccaaacctcaccatttatgcaacatactcatgtaacaaatctgcacatgtacctcctgcatctaaaataaaattttttaaaagaaaaatcttttgaaagaagccagagggggaaaaataccttacctacagagaagcaaagataagaattatgtccaacttctttccagaaaccatgaagataagaatgaagcatttacagtgttgagagaaaaaaaagtcttcaatctagaattctgtaccctgcaaaattattcttcagaagtgaaggagaaagaaagacaaagattctcagacaaacaaacattgagggaatttgctaccagaaaacctgccttgaaagaaatgttaaaagttcttcagagatataaagagaggaagcacattagaaaaagagtaagtaggcccggcatggtggctcacacctgtaatcccagcactatgggaggccgaggcgggcagatcacctgaggtcaggagttcgagaccagcctggccaacatggtgaaaccctgtctctactaaaaatacaaaaattagctgggcatggtggtgtgcgcctataatcccagctactgaggcagctgaggcaggagaatcacttgaacctgggacgtggaggttgcagtgagctgagatcacaccactacactccagcctgagtgacagggcaagactttgtctagaaaaaaaaaaaaggaaaagaataagtgaatgtaaataaaatgaaagcatgtgaaatgtgttcaggagcttatgaagtcccctgaacccgatcacttttccagaggatgagcagtgaatttcagcatcgtcaacagcatatattggcattcttgcagttgcccgcaggaggatatagtttatcagactttattcttccaagctacggagccccagaggagggaggagtctggggaagctggtcgaacagactagggaaaaaaagctgcagtggcctccctatcgtggggaattgctgtagcctgctacatggtagtcctacgatcctaacttggccaagattcttgtttgggttcaagagctgggtcaggagtcttcccaaagtgctgcacttgctgttccattctatgttcaatggaatacagcacaagatagaagacaaaacttacgaatctagagaatgtcagaaggcctggaagagcactggtgaagagcaataacaatgaatggggaggagttggggtccttgggtaccaaaccatgggaggctcatcccccagacaggagagccgcgtggcctctgtgattgcttcttccttggttttgtgctgtagaattttactggtcaggcatggtgatttacgcttgtaatcccagcacttttggaggctgagccaggaggactgcttgaacccaggagttcgagaccagcctgggcaacatagcaagaccccatctctgcaataaataaagacacaaaaattagctgggcatggtggcgtgcacctgtagtcccagctacttgggaggctgaggcaagaggatcacttgagcctgggaggtcaagactgcagtgagccgtgattgtgccactgcactccagcctgggtgacagaatgagaccctatctaaaaataaaataaaataaaataaaaataaaaaaaatctagacaaagtaccatagactgtttggtctagagcaatagacatttattgtctcacagatctggaggccagaaggccaaaatgccagggttggttccttcttaggagctcagaggcagaaactattccatgcctctctccttgcttttggtggctgctggcaagctgtggcattctgtgacttgtggcagcatcactttaatcttttcttgtgactatgcgtgcttgtcttccctgtgtgtgtctgtttcctcttcttataaagataccagtcattggattagggccaacccgtatccattgtgactacatcttaattaccgacatctgcaaggacctatttcaaatacagtcatattcacagatctctggtaaacatgaattctggaaggacactatgcaatgcaaccccagacagtgaggatgaagacgaagaatttgagtgtcactagacaatccagtttgtggaggctaaaacacctctgtcttgggtgctaattcgccgtgttggtttctgattaaccccgtcctcggaatgtccctacaatttctattttatctactgttctttgtgtaagaacacgtactacatgtacttagtacttactttttttttttttttttggagacagaatctcactctgtcacccaggttggagtacagtggcgctgtcatagctcactgcaggcttgacttcccaggctcaagtgattctcttgcctcagcctcccaagtagctggaactacaggcacacactaccatagctggctaattttcaaaagttgctgtagagactaggtcccactatgtttcccaggctggtctcgaattcctgggctcaagcaatcctcccaccttgaactatgcatggccagagcttgtctttactattgatcctgcccttaggtcaaaacaaccttgatcaaagaacctttaggcagggctgggtgtggtggctcacagcactttggaaggcggaggtgggcagatcgcttgagctcaggagtttgagacctgcctgggcaacttggcgaaatcttatctctaccaaaattacaaaaaaattagctgggcatggtggtgtgctcctgtggttcccgtactgggaggctgagttggaggattaattacttcagtcccgggaggcggaggttgcagtgtgctgagatcacaccactgcactccagcctgggtgacagagtgagcccttgtctcaaaaacaaataaaataaaataaaaataaaaattacaaaatcagaaaaattttaaaaattaaaaaaagagaaaatcctgccgttttcagtaacatggatgaacctggaggacattatgctaagtgaaccaaaccattcacagaaggacaaatattgcacgattccacttgtatgagaagtttaaagtagttaaactcactctgtgagtatcgactactaaatccaaacccttatcctgcctctttaatactgtaatagtacttttggtactataatagtagtaataatgacttaatgataacagttctgttctgagcgtcacgcatgctaacccatttaatcttccagcaaccctgggagtcagcaagaatcacgatcctcctgtttcagatgtgggaactcacagacatccaggactcaaagtcttgcttgaggccacaggctaagcttggttggaacccggagatgctggagggaaaactggtctcctgagcttgccaggagcagagttgagtgggacagaggaggcgagaggagccttcagttcttggtgagtgggggtgcatgagagctcttagccatggttcctcctcatcctctttaaataataatggctcttgcaatgcaagattcacattttagcacaaacgtttgttgacatcaaacgatcggttggtgggcagtcctaccgcaccaaagcctgaactggcaaaagtgaaaaccccagagttctgggtgcacgaagcatgtccgggtctacacacctggacagttctccccgcaagggaccccactcccatgtaatcccttaggcaacccatcaagttggaatagtaattacatgttggacatggcaaattcctagccctggaacaagatcactcaatcaagtcctttgtgaagtcttgccaattcaattattttttctttttcaggctaggcgtatagctgatttagcatgtgccatacacatggtctgtttcctcttctgtcttcccactagatcgtgcactagtgggaagaggtgggggtgcatatcacatgctcatgagtggagatgctcatgctatttagtctctgcatctgtgcatccagcaaacctatcaagtcaccgttttattattattattattattattattattattattattattattattattttgagatggagtcttgctcttgttgcccaggctggagtgcaatggcatgatctcaggtcactgcaacctccgcctcttgggttcaagtgattctcctgcctcagc[207 bp omitted]gtgctcctctgatgaggatgaggaggaaccatagctgagagctctcatacatccccactcatcaagaactgggactcccttcacctcctctgtcccacttgactgctcctggcaagctcaggagtccagatttccctccagcatctctgggttccaacgaagcttagcctatggcctccagcaagactttgagccctagatgtctatgagttcccaccttccgcttatttgtgacgacatcttattatctgcaagccggattgctgtggggacccagctgttattgtctgtattgaattcgaccagcatcaaaaacttgcagtttgctactcagtagctcaaaagaaactcttaagagacaataggctgtgtgcggtggctcctgcctataatcccagcactttgggaggctgaggtgggtgaatcaccgaagatcaggagttcgagaccagcctggccaacatggtggaacctggtctctactaaaaatacaaaaattagctgggcatggtggcacgtgcctttagtcccagctactcgggaggctgaggcaggagaattgctcgaatctgggaggctgaggttgcggtgagccgagatcatgccacagcactccagtctgggtgacagagcaagactccatctcaaaaaaaaaaaaaaaaaaaaaaagagacaataagtccaggaggcagatgcttgcaagggagagagagggagatagtgaataggcaacagttctgcagatcaaaagtagactagcaccacatcatttaaaatacaggctaacgagcccggggcccatgagtttttattctctgatgcattattaaaagaaatgcttcatcagtaaggctctgaatagcacaagtattatgtggaaaaatatgacatccataaattaggagaccagacattgacagcggagaagctttaggatcgtcttaatttgcctttttccacttatctatattcctttttatgtatctacaaacatgatgtctgatttaaaaaaaaaacctgtggccaagtacagtgttatttttcagtaagtataaaataattctagtggataagaaagcagtggtcatagttacattgggagtatattttcttttctgttctttaaaaaaaaatagcaagcagtgttatttttttttaatgcaaagatgtcctgaagaatacttaaaagaaatatctgcaagatcattcttcttggtcattccataaaaaattgtttttgaaactatgcttagtcctcatcaaacgttgtcagatgcatccatagtgaattcccttcttatttttctatttcgcttcataattgttacaggcaacacgactttggaaaaggaataaaatcgactttatgaaaattagtctcattttcaaaacctctgcaggaggcatttaaaatctcctagcatgaagggaggagacacatggttttcaagtaacatgtcactaggattttccaatttacattcttagtctttcattattttattagccgaactttcttattttttaaaaaatctttacctatggattgtgtttctgacatggaagggagagtatctttttctttcttaaggtacctaaagcaagggagactgttgccctccatggcgactgggatttgattacatacagcagccgatgtgcaggactccgtcccagccagggtcacctgtctcctcaccttcttccagaacgttaaatacagcgccgaccacaccaccgaccacaccgcgaatcaggcagacccaaaccagcaggagccccatgtgccgggccatgctcctgtcagacactcgtggtcgaccagctgatgtccaagattttatagcccctggaactaaccacaaccacttcccctccctgtccctcctctctttccctcctccccacttcttccttgtccctctcctttttcaccttctcctcctcctcattctttttctcccttctccttctcctctcctcctcctccttcctttcctcctccttcttcttctcttccttctcctcctcctccccctccttttcctcccctcctccttttcttctttcttcccctcctcccggtcatcctcctcctccctctctttcccctctgtctccccctcctcctcctccccctcttcctcctcttccctcctcctcctccttcccctcctcctccgtctgctcctcctccccctcctcctcttccttctctttctcccctcctcctctcctcctccttcttcctactctccctcattcccctccttctctccctcctcctcttccttcttcacctcctccccccttctcccccctttccctctttctcccctcctcctccttcctctcttcctcctcttccctcttccacctccttccctgcctcttctccttcctcctccttcccctcttccccttcctcctcttctttcatctttcatccccaccttctccctccttccttgctctcactctgctccaaagttaagctatctaccttgcataggaagaaatatagaaaaagaaatacttaaaataacagggaagatgcaagctgaggaatttcgcgtcgtttccacgaagagaagcatcagggagcccatgggcagtcacaggcttcccggtatctcagatcttcctggtctttgtcagccagggctcaagaatcccctggagaggcccagggaggcttcttggaaaagcaggtttgcttccctaatataagcacctttgttgatgctccacaaaccttcagtgtgggccactgttctctggaggcccttggtgattaacctaatgggctgcagatggctttgaagttctgaggaacaagtggtgcagccttatggacacctacatttccaactatgaaataaataaataaataaataaaagtatttaaaaaagaaaaatcagattaatcctgaattctgaaacccaacgtgttcttagttactgttccttttttttttgagacagaattttgctcttgttgcctaggctgtagtgcaatggtgcaatcttggctcactgcaacctccgactcataggttcgagcgattctcctgcctcaccctcccgagtaaatgggattacagaagcctgccactacatctggctaatttttgtatttttagtagagacagag[138 bp omitted]tcacgtctgcaatcccagtgctttgggaggttaaggtagggggatcgtttgcaaccaggagtttgagaccagcctgggaaacataatgagaccccccatctctacaaaaaaaaaattgacgaattagccgagcatggtggcatgtgcctgttgtcccagcactttgggaggttgaggtaggaggatcgtttgcaaccaggagtttgagaccagcctgggaaacataatgagaccccccatctctacaaaaaaaaaattgacgaattagccgagcatggtggcatgtgcctgttgtcccagcactttgggaggttgaggtaggaggatcgtttgagcccaggagtttgaggctgccaggagctatcatcgcaccactgcactctagcctgggcaacagagtgagaccctgtctcagaaaaaaattgtggaaaacgggctatcttttcatctccatttttttttctcagtaagatggaatctcctttggaaaaaagtgtcaaaagaaagccctccccccaactaaactgtcaaaaatgtcagcaactatcaaattagaaactcttatgaaataaaagcctatccaagactttaaaaatacctttgaggaatcctagtttttggaaatgactgttgccttcacttatttctaacatttcttttttcttttctttttttttctttcttttcttttttttttttttttacatggagtctcactctgtttcccaggctggagtgcggtagcgtgatcttggctcactgaaacctccacctcctgagttcaagcgattctcctgcctcagcctcccaagcagctgggaccagaggcgtgtgccagcagacccagctaatttttgtatttttacaaaaatacaaaaattttatttttggggtgtgctggggtgtgccagcagaccccagcagagatggggtttc[133 bp omitted]cagatcttgattatattctacaacataatgggtggtctctggcacactgcctttttgctattattattgatactttatgaagaccaagtgtgctaagacattgtacatttgcggagccacccattctcccctttaacatctttgtttcatgtcactcttcactgcattgcatgtcatcagtttcccattctgcaagtatttcttcaatcagtttccctttattattagccatacgagatccaaaaatcccttagcaggttaatgtggactgggtgcagtggctcatgcctgtaatcccagcactttaggaggccaaggtgggtagatcacctgaggccaggaatttgacactagcctggccaacctggtgaaaccctgtctctcctaaaaaatacaaaaattagctgggtgtggtggcatgtgtctgtggtcccagctacttgggaggctgaggcaggagaaaggcttgaacccgggaggtggaggttgtggtaagccaagatcataccattgcactccagcctgggcaacagagcaaaattctatctaaaaaaaaaaagaaagaaagaaaagaaaagaaaatagtagggctttttcattgttcagctgaaacctctccagctcctcatagctgaatttctgggaacgttccctcctctgttcattgatattcttgtccctgaccccagcccccgcaaggccccttctgtgtacacttgactgaattttatgggcctcgtggatatgcatgggcttatctccagacatcataaattaaccacagctgatctcatccagactgccttctgacagtaaccactgatgaagaaccctcctttgagaagctgcctttgtgtcctacagacaggctggggccaaagccattcaaccaatccccagataatccagagctcttgggagcagaaccttaaagagagatcgtggagagagccagggcccagaagaactctctcaaaggtacattttgacccggaaacttgggagggtgtgacaagtggggtcttagggcccccatagcaaagaaggaaggtctagagcatcatggtgcactagaaatataatacgagccacataaatcattgtaagttttatagcagaagcactttaaaaaactaagaagagtgcaatttattttaataacatgttctgtggaatccatgtatatctaaacgattatcatttcaacacataatgaatacaaataattattaatgagatactttacattttttccctatactttgtcttcagaatcaataggtatcttacacttacaacatagaacaatttgaactttcccatttcaagtgctcaagaaccagaagtagctggtggctgccatattggttctggaaggggacagccagagaaagtagggaaggtggtcttgtgggtgaggtcctttctctgttaataaactcaaagaaatgggttaaaccagattctatgaatgatgtaatgctaaggaaggttgcctgaatcccaagcttagggaagaaactgaagaaaagggaacaagttacctgttaagagactgggtgaattacttattaaattcttggtagtggattaaaatcttcatggttctgtcaatgtttggaccatttctccaaggtaaggcttactctccctattttaggaaaaagaaagttgagattcaaaaagagcttactgagatcctgttgcttctccctccaaaggcagcctaaatatgtaatagaagaggtgtgtgtgtgcgcctagaggtggagggaaggcttacactgaagttttgtttcagatctggggtcatttgctgctgagaagcagaaggactcattattttgaaggtacactatacttcagtgactttacagccccatgtgtgcctgtaattattcacaatggcttctatagtttaggttttatctccactaaacagataggaatactgacttggagttcagagaggtgaaatgaccttcccaaggccacccagttgaaacatgggagaggtaggatttgaaccctggttggttgggtgctattatcttctcaccgctccactgtgaaattattttggcttaagagaacgagagggcagaggctgtgggctaagctgcctcttgggcaccctatcagggccttaatactaccagttgtatctgccattattttccatgttgggtggtagatattggtgccaatgtcttatctatagctgtttgaagacagctatcatatctggttcctcttggtacccaccacatttccttatagatgatagggttcttgaatactcattggatgggtggtggattgaaggaagattaaagaatgaaaggaaggatgggtggatagaagaatggatgaacagtgaaagaatggatggatggaaggatggatgagaagtggatgaataaactgaaggatggatgaaacgatttatctctgattgttgaaggcagaaatcatgtatggttcctcttggtacttgacacagtttcttatggatggtgggtttcttaaatacttatttgatgaatgattgatggatggatgataagaggatggattcaatgaataatggatgaatagaaggataaatgaatggacagatgagtggatagatagatggctggtgaaagatgggcaaaaggatgggagaattgatagacagatggaagaatgggtggaaggatgaatgggtggatgaattgatggatggatgtatggatgatggaagaagatagatgaaaagatggatagatggaggaatggatgtaagaatgggtggaaggatacatgggtggatgggtggatggatggatgatgaaagaagagttggtaaagggatggttgatggatggatggatgagggaatattaacaatgaagagtatcattaagcagagaaaaaatttctcagaaggtaatattttcaggaaagtttgaaagccaataaataacaaaagtaaaagaagagaattagaacattctcaaaatgtttgcttaattaattaattactgccggtctagcatggtgaatgaatgttatcatcatcatcatcgtcatcattaatggccaacatttattgtgagttatctctatagcacgcattgtcttaagcattttgtatctttcatctaattcaatcctcccaacaactctatgaagtagaactgtttattagcatccccattttatagaggggtaagctgtgaagtaccttattaaatgtcactctgctaggcaccactgaaacatccacacaggtttttaattactggcatgccagtggaattggaatgccaacaccaagaggccccggcacagcgctttgctctatagatgttcaataaatttggtaagtcaataactacctcataaaattaatccattcctaagacagccatctcattgttgcagatttttcattttgtgattttaaactgcctcctattgctttactcagggtgttctatcttttttaaaaaccattttaactctgcatgttttcatgtgagcatatgtgcatgcatatacctgtatatgtgcacatatgatgtgtgtatattacacatgcctgtatacatatatacacatctataatgtatacaggcatgtgcacgtatatgtatatacacattatgtatgtgcatatacatgtataattactgtttctaaaatgttttattgatacacaacaattgtatatatttattgaggtacgcgtgattttttttcttttccttatttatttatttaatagacatggtgtcccactctgttgtccaggctggtctcaaattcctggtctcaagtgatcctcccacctcagcctcccaaagtgctgggattacaggtgtgagccactgatgtgatattttgatacatgcagacagtaatgatcaaatcagggtatttaggatatccattactttcaacatttatcatttctttgtgttgggaatattgcaactcttctcttctaggtatatacataattaaattgtttttaaagacataagtcacacatctgtgataaaaacttaattggaaagaagtctcctatttacccctggttcccacttccagaggtgattgatatcagtggcttctcacatgcccgctcaggaaaacactctgtacatgtatgtgcatggggaacacagatgcagtgtcttgctgagaactacaaggctctgacctaggtttgctagtgtcaccatcttttcgttcctctgcacttactccaaaattggtagtcagcagcttccagtaaaatctcaaggatggcctgggcgcggtagctcaatcctgtaatcccagcacttaggggggc[134 bp omitted]gaggcaggagaatcgcttgaaccgggggacagaggttgcagtgagcttagatcgtgccactacactctagcctgagtgacagagtgagactccatctcaaaaaaaagaaaaaaaatcaatcaatcaatcaatcaatctcagggattgggc[187 bp omitted]ggtggtgggcgcctgtagtcccagctacgcgggaggctgaggcaggagaatggcgtggacccgggaggcggagcttgcagtgagccgagatcgcgccactgcattccagcctgggtgacagagccagactccgtctcaaaaaaaaaaaaaaaaaaaatgcagagtccaaccttttgggggacatttcactggaaagggaagaaagtctcagacgagcttgtgtacaagtccagtaaacacaccgcgcatgctcacttcccaagcctaaaggaggcactgcgcatgcgggaggcccaccctaaggggaaaaatgaagggtccagccatgtggccctcccttctgtgcgtcagaacatgtcacattgtttcccacatcagcagctttgccctcactgatccctgtgcctggaatgcttgttcctcacactgtgtgtggctgactctaggttttggttcaaacatcacctgctcagagaggccttccctgaccaccaaaggagacatctgtcaggcatgattgtttacattcccctgtttattattttttttcattgcacttttcatattctgaaatgattttggttttggttactgtggtagaatacacataagattatgattttaactattttaaagtgcacaatttagtggcgacaagcacattcacaatgttgcaccatcatcaccattatctatttccaggaacttgtcaccaccccatactgaaagcctcatttctttttttttttttttttttgagaaagagtctcgctctgccacccaggctggaatgcagtggtgtgatctcggctcacagcaacctccacttcctggcttcaaacaattctggtgccttagcctatggaatagttgggattacaggcatgtgtcaccacgcctggctaatttttgtatttttagtagagatggggttca[142 bp omitted]atattagcctcatgcaagaaggaatttcacctgtccagtctaccgacaactccacatagtaggaggaacacaacaaatatttatcacatacgtgattttttttttttttttaggaaatggggtctcgctctgtcattcaggctggagtgcagtggtgcaatcatagctcactgcagcctcaatatcctgggctcaagtgatccttccccctcagcctcctgagtagctgggactacaggtgtgcaccatcttgctcaactaatttttaatattttgtagagaaggagggggtctcactacgttgcacaagctggtcttgaactcctgaacacaagtgatcctcccaccttggcctcccaaagtgctgggattacaggcctgagcccgcacgcccagcctatgtttaccatgattatttgttgagcactcagcatgtgccaagaactctgcttacattgtatcatttcattcttcccccaccccggccgccccccaaaaatcctgccccctcccccatcccccatagatggagtctcactctgcccaggctgtaatgcagtgagccaagactggcacgatcttggctcagtgcaacctctgcctcctgggttcaagcaattctcctgcctcagtctcctgagtagctgggattacaagtgcgtgccaccacgcccagctaatttttgtatttttagtagagacgtggtttcactatgttggtcaagctggtctctaactcatgaccttgtgattcgccctcctcggcctcccaaagtgccgggattacattcatttcattattaaacagtcctacgggatagatttcagttgtctcatatatagaaaagaaagctgagagtcaaatacattccataacactctgaaggtcacacggatgagcagaaattcgtatacaggctacccttttccgaagccacaaccacttacgtatttctccattgtggagatgaggactccgagctgtgcgtgtgtccatggagccacacagctggcttgagagggagcctaaggttagacacctttgctccgtacctgttccaggatggctgattcaaatgggacagagataatgaaaatgataacgattaatatttacaaagcacgttttatgtggcaggcagggttttcagccccctgtgtgtgcattagttttctgcagtggctgtaacaaatccccacacacctaaccgacttgacacacatttgttctcttacagttctgtgagtcagtctcactggggctaagatcagggtaccagccaggctgcattccttctggaggctgtagggaagaatccgcttcctggcttcttccagcttctaaaggtcgcctgcattctttggctcgtggcctcttcctggcataactctaacctctgctttctgttgtcacacctggttttctgactctcctgcctctctctctgttttttttttttttgacacagagtctcgctctgttgacaggctggagtgtggtggtgcaatcttggctcactgcaacctctaactccctggttcaagagattctcctgcctcagcctcctgagtagctgggattacagctgagtagctgggattacaccacacccagctaattttttttttttttgtagtagagacgtggtttcaccatgttggccagcatggtctcaatctcctgacctcatgatccttgtgatccacccgcctcggcatcccaccacctctcttttataagggcccttgtgatgacattgggtccatctggggaatcccggatcatcttcccatctcaagatccttagctttatgacatctgcaaagtcttccacactcctttttttgagacagggtctggctctgtcacccaggctggatcatagctcactgcagcctcaaaaccctgggtgcaagtgatcctcctgcctcagcctcttgagtagacaggactacaggcatgtgccaccatgctagttttctttctttttttttttaagattgtttgtagataggggtctcactgtgttacctaggctgatctcgacctcctgggctcaaccagtcctcccacctcagcctctcgaatagctaggactgcaggcatgtgccaccatgctggctgtttttttttaattttaagattttttgtagatacgaggtctcactatgttgcccaggctgatctcaaactcctgggcttgagtgatcctcctgcgtcagcttcctgaagtgctgggatgacaattatgagttaccatgactggcccgcaaaatccactgtgccatgcaacctagcatattcgtggactctaggaattaggacgtggacagatttgtgttgggtgggtattattctacccaccaagcgtctatgaacgacactaacattctgtagcagcaacagtgatcaccatcccttccactgtgcggatgaggactgagacccaggaaactcagtactttgttggggtcacaaaggtagtaagaggcaaagcatggaaacccaggtggttgggctccagggcaggctctttctggcattataaccttctgcctgtctggatcttagcatctaagccaaaaattattcatttgaatcttgaggagaagggtcaaaatgaaagcttgaggttaatgaaccaattaaggtgtaggaattggggttttgggccaggcaggaatataagcatgacactgcaggtagtcaagggtttagaggaggtggcaaaatttgtctctcccccatctccataaatagtaattaaaacatctcgcttgggccgggcgcagtggctcatgcctgtaatcccagcactttgggaggcccaggtaagcagatcacttggggtcaggagttcaaaaccaacctggccaacacggtgaaaccgtgtctctactaaaaagacaaaaaaatagctgagcgtgatggctcgtgcctgtaatcccagtgactcaggaggccgaggcaagagaattgcttgaaccggggaggcggaggttgcagtgagctaagatcgtgccactgcactccagcttggggtgcagagcaagacttcatctcaaaaacaaacaaaaattctggcttgtatgctgtcttcataaatagtaatgaaaatatctggcttgtatgccccctctgacatttacacagtgctttccagcatctgctgcatgtataagatcccaaggtggagtttattctccctcatttgatgattggaaaaactatccccatattttcctgtggtttgactccatagccacagcaaccctttttccgaccagccaagaaacagcagcggtggcaggatgctggtcccaaccaccccggggctcaggacagagggttctccaagcatctgaacctgccagtgcccaaagcataacttggtcctcacctggatgttccagacgagacatgggtgtctggctattagggcttgttttacagttgaataattattttgaatggcccctaaaatattttctatgaatatccataacttggtctgtgcagagtcataaaccttccagaccatcagttgctaccaattcttcgaatttgcacagaactctttattgcacaaagaagcaagccatgcaaatagctggggtcaagggatcatcccaggcaaagagaagagcgagtgcaaaggccttgaggtggcttctgcaggaaacaactaaaaggcagatcgagggaggggaaggaagataagaaatgagtttgagggaaggcacagtatggactagggattgtattctaaaggtgatggaggattttgaatgaataaatgccacccctgctctttttttttttttttttgatggagtcttgctctgtcacccaggctggagtgcagtggcacgatctcggctcactgcaacctccgcctcctgggttcaagtgattctccttcctcagcctcctgagtagctgggactacaggcacctgctaccacgcccagctaattttttttttttttgtatttttagtagagatggagtttcaccatgttggccaggctggtctcgaacacctgacctcagacgatctgcccacctcatcctcccaaagtgctggaattataggcatgagctaccgtgtccggcccactcctcctcactttaacccctcccgtggcttctggttgcttctattctattctattctattctattctattctattctattctattctattctattctattctattctattcttttgagacagtcttcctctgttgcccaggctggagtgcagtggtatgatctcggctcacagcaacctctgcctcctgggttcaagcgattttcctggctcagcctcccgagtagctggaattacaggcacgcaccatcatgtggagggaatttttgtacttttagtagagatgaggttttaccatgttgaccaggctggtcatgaactcctgacctcagatgatctgcccgcctcggcctcccaaggtgctgggattacaggcatgagccaccacacctggccttctggttgcatttagaatctgagggaggctctacagggtccggtcccatccatctcaccatgcatctctgtggccttgctcctcctcacttgttgtagagacgaggtgtcactgtgtggcccaggctggtctcaaactcctaagcttaagccatcctcctgctcagcctcccaaaacactgggattataggcatgagccactgtgcccagcctgggccttagccatgcgggtcccacttgctccttgagcacatctagctttttccatctcaggcagtttccacgtcggcttctcctgcctggatgtatcccccacccccatacctccagctcctctcacgtctccctcctccatctgttcctccaggtgtcagcttacctgtcatttctcagagcaccctcccctcacctctcaatcaaaagtgaccttgtcctagttgttcctgagactcgtccacagcaatgatcacagcgaagagttgtatttgtttctggtttcttcgcttcatatctgtctccttggttgactctcagccccacgaaggcagggcctatgcctgctttacccactgctgcatactcatcgtgtagccctggccccacatcttttaaatgctcaataaatactcattcctgagtggatgcataaagcatgcatcaggaaagggcccatactgggcacagtggctcttgcctgtaatcccagtgcttaggaggctacgcaggaggatggcttgggctcaggagtttgagaccagcctgggcaacatagcaagacctcgtctctacaaacaataataatagtttaaaaattagctgggtgtggtgatgcgtgcctgtagtcccagccacttgggaggctgaggtgggaggatcacttgatgggagatggaggctgtagtgagccatgatggcgccactgcactgcagcctgggtgacagagcaagaccctgtctcaaaaaaaaaaagaaaagaaaaaagaaaaaaacaaaaagagaaaaagagctcagccttgtagaggagagaggctggaggctgcatatcagtgaggcaacaggacaacagttgaatagttgagaagagaaatgaaaaaggccttcctttagtctttaacagcagaggcaggaaaagcggatagattcaggagctccagaaagtagaaccaactgactgatagaacacagcaagagacagggacagcagatctacactgggggctacaactcaggtggttgagaagaacatagtgcaattaaatgaagtaacatgggggaaggatagcatattttgggctgtatctcaacagccaaagcttggaatttgagatgcttgaaggacatctaggtggacatgtctgggaggcagttgaaaatacagttctggctctcagaagtgaaacaatactatatgaacaatactattttggatgatatttatgagttcttagcacatgtccggtcccatgttaagcctagaggcagcatcgtacattggttaagagctcaattactctgaactgagtcagattgttggagttcacttgcaagttctccaacttgcatgatctgtaaccctcagcaaggtgcttaagcttactgtgccccatctgtgcatatctggggtagtaatggtacctaccacgttgggctacttcctatcaggattacagtgaatttagaatagtgtgtagcactcaatgagttttatctgttttttgttttgttttgtgttttgagacagagccttgctgtgtcgcccaggctggagtgcagtggtgcgatcatagtgcactgcagcctcgacctcctgggctccagtgatcctcccacctcagcttcctgagtagctgggactacaggcatgcaccaccatgcaaggctattttttttatttttgtagagatgaggtctcactatgttgtccaggctgatctcaaactcctggcctcaagcaatcctcccatcttggcctcccaaatctgtcatatttttatgattgtcgttaatcatcataacaaggctgagtggtagataggattagcatcctcatgttttgacacgacgaaactgaggcttagaaaatttaaggttgggcccagtggctcacgcctgtaacactagcactttaagaggccgaggcgggtggatcatttgaggtcaggagttcaagaccagcctggccaacgtggtgaaaccctgtctctactaaaaatacagaaattagccaggcgtggtggcacgtgcctgtaatcccagctacttgggaggctgaggcaggagaatcgcttgagcctggcagatggaggttgccgtgagctga[132 bp omitted]aaacggtggagctgggatttgaatctgactcattcatcctgcattgtcaggtctaagtcctgactgagccactagccaaagagaatgagagtccttcacaagtagtgaatgagacatcactcagaaaaagcctgtttgaggcatggtgctggggttaagagtaaaaggcttcaaggaagaacgacaagaaaaagggagaaagacactttgatgtgtagcgggagagccaagcactgttgggagaggaaaaaagtttggggcgtgttgtgtggctcagatactcagtggtgccacctacctgtgggaggacttaaatcagtaactttgggattttgattcctggcggtatctgggtttcttgctaaaagttggttccatctgatgccttcccgagctatcctgaccttggctttaataattcataaatgccactaacgatctacaagtgaaaagcattttcacatcaaggtctaattggaccctcgtggccacccggagacacaggaacgactaaatacattctgcagatgaggaaacaaaggctcatagaggggaaggggtttacgttgcctaagaactctgacactagtatagacaggcccgcactgactctgagatacatcacgtaccagctgtggtcctttggtaagttacttaacctcccaagcctcagtttcccttttctgtgaagtggagatgatcatgcctgcccttagattttcaggagcaaattggattgtggatacaaagcttaggacatccggtatacagtaagcagtcaataattgggagccagccgtagaagtggtgatagtagctgagactcaagtcaaatccagaccaccaattccaaactgtgggttcttgttgctgctgagaatggcatggtcatctgtcatcaaggaaacggcacgaaggaaaatagagctagtaataactatggttaatgaggacggtaaatgctaatcactgaaggactttcgtctccagctaaggagatgagtgtgattcatggggaggatttaaggctattgttaaggttccaacaatgagaagggcccttgcagccattaatatgggttagaacccagaccctgccctttcctccctgggtgaccaatccaggtctgagtgttagtttctgcatctataaaatgggggttaaaacatgtattacttgatttatgaaagccaagtgacataaagtgtgttgaacatcgagcctggagtacagtaagtgttcaacaagtgtttcatttttttctttccatcacactttcctaaggacagtacatgacagtagagttatgcatcaggaatacagtctgagaagtgcattgttaggcaatgtcgtccttgtgtgagcatcatagagtgtactcacacgaacctagatggtagtgcctgctacacacctgggctatatgatacagcctgtgcttccaggctacaaacctgtacatacacacatgtagaaacacacacacatatcacacacacatatgtagaaacatatgtgtgtgtgtggtatatgtgtgtgtatgtgtgtatttagagatagggtctcactctgttactgaggctatagtacagtggcacaatcatagctcactgcagccttgacctcctgggctcaagtgatcctcttgcctcagcctcctgaatagctgggaccacaggcatacaccaccatgcctggctaatttaaatgaaaattttgtagaggtggggtctcactatgttgtccaggctggtcttgaacttctggctttaagcgatcctttgtcttggtctcccaaaatgctgggattacaggtgtgagctaccatgcctggtctattttttaaattactgtggatggaaagaaaaatggcatgtatgacgtcaaatctaggaggtaatgggaagaggaaggggacgtgtgggatgaaaatttttgtcttcttttccacagagaagagggcagccaagatgacccgatggtccagttacctgttgggatggacaaccttccttctctattcctatgagtcaagtggaggtaaggacactcaaagcaacagggaggatttagaagctggagaagaatgaatggggcaaagcaaagattcctggaactaagtaggcaggagatggcttagcaaaaatctcagaagaagctgggcgcggtggctgacacctgtaatcccagcactttgcagggctgaggcaggcagatcacttgaggtcaggagttccagagcagcctgcccaacatggtgaaaccccatctctactaaaaatacaaaaattagccaggcatggtggtgagcgcctgtaatcccagctacttgggaggctgaggcaggagaatcgcttgaacccaggaggtggaggttgcagtgagccgagatcgtaccactgaactccagactgggagacaagagcaaaactccctctcaaaaaaaaaaaaaaaaaatctcagaagacctggggtttggaccctggatctgccacttcttttcttggtaactttggtcaagcaacataagctctctgaagtcaatttccagactgtaaaagagaagtaacggcatttatctcacggggttattttgaagatcaaataaaataatgggcaccagcatctttcataatgctcagcacatggtgggggtaaaaggcaggctatataattccagtgaacagaaccttcagaccccaacctggacaacctaattatatcttaatatatctcagaatctaaattaaccactaaaagactgtaaggtaagcatggaaacagaacaagaggaaaccttgcttacatgtcattcactcaagccttggtgagtcattcttcacaattagaatccttttctgcctgataaatcgttctcctctggataaggctcaggaaccatttgcatattgatgcaccttgatcccacattctttattccagagattcctaacctggggtcattgagtgaggattagagtccatgaaaactggaatttacgttttaaaaaaagtgtgtatttatgagggtagtgagaatagctattgtaacaaacaaaatccaaactatcagctgcttgacacaataacattttttttttcttggttctgcaaaatcccagaagggtgcatctggtcaggaaacaatgctccacatggtcattcagggatccaagcttcttacatcctggagccccaacatcccctacggtttcagagtctgctgaggtttctttgcttttagcttgtagacaagtatcaagagagtctggaggaccttggaggagagggttttttgtttgtttgttttcttttggccaggacaggaagtgacattcatccctttctcctgcttccactggccaaaactgatatggctcttaactgcaagcaagtctgggagatgcagtgtagcagtgcatttgggaggaaagtgaaactgatttcggtgaacacacagccatctcaaccataagggcatatgaatattctcctagagagaagttctgggttctcaaagaactgacaaattcctgaaagtttaggaactcacagtttattcagacaaggaacaatgtacttgatggggtatccacttttctagttataatctcatttttgtcatgcctccctgagaccacacccacatacttgtggtgaaactcagtattccaagttccctttgcgtgtatttacagataaattattcagtatacacttactgagtgatctttaagttccagacattgtgttatggaccagaagtgcagaaataaacaaaacctaaaccctccactcagagagttcacagtaatcgggagttatagacacataaatgaattatttttaaaaaattggcaactgcattcatttatagagattgactctgagtattataagtgtgaggaagagtattgacccagactgagccaagtcttcatggatgaatagcagggactaaagctgggaagagaggaaaggcattcaggacagggtgaagggcaggaccaaaatctcaaagacgagaaagaacatggaataaggtcaagggaatgttaatcagggagtgagaacaggcaggtcagcagggtctggattatagaggattgtaactcagttaagaagattaggccatctgctggattactttgcagatggctaatagtattcattatgtgctgattcttactaacgactcccaaagataaccttaattccacctacaggggcatctgccctctccctcaacacagtatcctatatactcagtggtgttcgtgactgaggcaaagcattgataatgacaataatgacagtgaagatgacaatgataatgatgaggatgatgatgatatgacgatgatgacaatgatgacggtaatgatgacaacaataatagcgacaatgacaatgatgatggtgacagtgatgatgatgacgatgatgataatgattatgacaatgatgtgatgaggaggaaaataatgattacaataatgatgacaatgatgatgagaatgacaataatggggttgatgatgatgatgacaatgattgataatgatgatgacaatgacgatgatgatcaccatgataatgacaataatgaggttgataatgatggtgacaatgactgatgatgatgacaattatgacgatgatgatgatgatggtgacaatgatgatgacgatgataatgatgatgtcaataatgatgtgatgaggaggagaataatgatcacgatgacagtgatgatgatgacaatgacaataatgaggttgatgataatgacaatgactgataatgatgatgacaatgatgatgacaatgactgataatgatgacaatgatgatgatgacaatgatgatcatcatcacatgataatgacaataatgaggtggattatgatgacaatgatgatgacaacgatgatgatgatcatcatcctgatgacaatgacaataatgagactgatgatggtgacaatgactgatgatgatgatcatgacaatgatgatgagcattatgatgatgccaatgacaatagcgtggagaatgatgatgatgacagtgatggtaatgatgatgatgatgacaatgataatcatagctaatatttattaagcagcagccatgctccaggtactcttctaagcactttccagatttaaactggtttaagtttcacaaaaataaataccaaacagttctgagaaacaaggtgaaaaatgcaatgaactaacagttgagcaagttgagctctcatcccaggtctacaaaaaaaaagcaatcaactttaattagtccttattgtacgtgggttttcatgtaatgaggaatttgggatagaatagcatttctttcttttttcaaaaaaatttacacatcaaaattctgcagaacaccgtttttgttttttgttttgttctgttttgttttgttttcagacagggtctcactctgtcacccaggctggagtacagtggtgcaatcatggctcactgtggcctcaactactcaggctcaaagggtcttcccctcagcctcccaagtagctgggattacaggggcacaccaccatgcccggctaatcttgtttgtttgtttttttgtagagatgggggtctcactttgttgctcaggcgggtcttgaagcgatccgcccacctcagcctcccaaagtgctgggattacaggcatggagcattgtgcctggccgagaacagcattttttgatatatttcagggaccattagtctctagtgccattgaattttgaaaaaaaagaaggacaactcgatatactgtattcatcaattctcattttcatattaacttttctgttgagtccttcattaaagaaacctgtttaactttatttcacgtggcatttttccaaacttattttattgtttctgttgtttcttgagcaaataattattctaggttctgtagatacactgcacaaaaaacaaagttcctgtactcattgagaagaataaggacgtcgaaagttgtcccctcaatatttgccacatctgggtaccaccagtactattatttactcaacatttttctttaaatttgcttacttttcttcactttaaaaaattcattttgggagattggttaacatcagtattataatataaaaaagcactaccactttccataaataggaagtacgaccaaaaagaaatactgtactatgaaaacaaaatcccattattaaattctgctagactatcgtccgaataaagctttgagtttgagtcctgctccccacccccctctcttttttgttaaaatgggagattattaagtattagagatgcagtagagaaatactactattaaattgaagctttctcttttgcgtaagcagaaggactaaaaggaccactggaaaatgatttttttctagtctatatttcaaaattatttaatgtgtgtccttacataacctaatgtgatcttgtgatccaccaaaaagtattttgtgtaatgtcattggccccccattttatgctctgagaaacagtggtctcaaggaacaacacaccacggttgtcttggttgtgtatgaaactcttccccagtgctcctggccccaacatgaactggatatgctctgacatgtcattaggaaattggatgctaagcctaggtgtgtagccttcaggccaccatgagaactgtctcagtccatttgggttgccataacaaaataccacaggccaggcatggtggcttacgcctgtaatcccagcactgtgggaggccaaggtgggaggatcacctgaggttaggagtttgagaccagcctggccaacatggcaaaaccccgtctctactaaaaatacaaaaatttgctaggtgtggtggcgggcacctgtaatcccagctactttagaggctgaggcaggagaatctcttgaacccaggaggtggaggttgcagtgagctgagaccagactactgcactccagcctgggtgacagagtaagacttcatctcaaaaaaaaaaaaagtaaataaaataaaatttaaaaagtaccattgactgcgtagcttataaacaatataaatttctgtctcccagttctggaggctgagaagtccaagggcaagtcaccagcagtttcagttgctggtgagggcctgcctcctggttcacagatggtgccttcttgctgtatcctcacatcgtagaaggggctagctagctctctggggtctcttataagggttcttatctcagtcatgaaggctctgcccttacgacctaatcaccttccaaaggcccctcgtaccatgaccgtgggggttaggattttaacatatgaattttgcggcgggggcagggagggaacacggacattcatattaaagcaagagccaaaccaagactcatcctttgctaattcatcgtgattcttccccactcctgttttctccttctgcccttcagggatgcatgaggaatgtgtctttcctttcacctacaagggatctgtttacttcacttgcacccatattcatagcttatccccttggtgtgccaccagagccgtgtacaacggccagtggaagtactgccagagtgaaggtgagtggtatcacattgtccctgccagtggcctttgaatagggtggatcacaaaagagaatgtgtgactgtctatgacatgatcacatttttgcagacaaacggtaatacgtatgcgtgcgtagaaaaggctctgggttttaatgatcgccattctaacttgtgtgagaacacatggacacaggaaggggaacatcacacaccggggactgttgtggggtggggggcggggggagggatagcattaggagatatacctaatgctaaagacgagttaatgggtgcagcacaccagcatggcacatgtatacatatgtaacaaacctgcacattgtgcacatgtaccctaaaacttaaattataataataataaaatttaaaaaaatcagtgataatgtaatgggtaataaatgatatataattactgtttttaatttccacaaataaaaaaaaaagaaaaagaaaaggctctgggatgcctgacaatgaatgctaataatgggtaataatgttaataatgctagtgttaaaaatagtgctctctggatgagggtcttgtgatactgtaagactagttgacccaatagaaccatcccatctttatgcctttcttaattttctaagttaataaggaaaaaggaaacgaagtgtaagaaacgggatttgaggctgggcgaggtggctcatgcctgtaatcccagcaaaacttaactactaatagcctgctattgacgagacggcttaccagtaacataaactgtcaattaacacatatgttttatgtcttatgtattatataccgtatctcataataaaggaaactagagaaaagaaaatgttaataagaaaatggtaaaaaggaggaaatatgtttgctatccattaagtgggaatggatcagcataaaggtcattagcatcatcttcatgttgaggaggaggaggaagaggaagggttggtctcaccatcttgggatgacagaggcagaagcaatggaggaggtggaaggggaggcaggagagacagacacattca[144 bp omitted]tctactaaaaattaaaaaaaattagctgggtgtggtggcaggcatctgtaatcccagctactcgggaggctgaggcaggagaattgcttgaacccaagaggcagaggttgcagtgagccaagatctcgctattgcactctaatctgggcaacagagtgagactctgtctcgaaaaaaagaaaagaaaagaaaagaaactcacatataagtggacccgagttcaaacttgtgttgttcaagaatcagatgtatatggcataggcaaatgcttgatgaaataatgcataaagtctcttctgaaccttatgtctgtcctgtcctatgatggttgattgatgattaaatgactctgtcctgtgaacgactagaggaagttaagacactcacgaactctgttcctaacagattacccacgctgtatcttccctttcatctatcgaggaaaggcttataacagctgcatctcccagggcagcttcttaggcagtctgtggtgctcagtcacctctgtcttcgatgagaaacagcagtggaaattctgtgaaacgaatggtgagcccctgtagcagggatgggatgtgtggtgggagggagagtggacagcatggatcctcctgaggggaggctgggcaaggtagagaccagagcacccagggggaagtacttacaggagccaagtgtctgctcagagagttcgctatgacaacgacagacaggggtatcccgaggccattcgcccagtccccagtccagcatgaaaagacaggagtcctgagaactgaaacaatgagctgaagtcctgatattggcttctgagtatttctgtttctagaactgacaatagtgagattcacccactgatggacccaaactgccttttctttccttccttccttccttgcttccttccttcctttcctttctttcctttcctccctcccttcctccctccctcccttttctctttcttttctttccttctttctttctttctttctttctttctttctttctttctttctttctttctttctttctttcttccttccttccttccttccttccttccttccttccttcctcccttcatctctctctttctttctttttctctttctttcttctgttttttacagggtcttgctctgtcactcaggctggagtgcagtggaatgatctcaggtcactgcaacctctgcctcccaggttcaaaggattctcctgcctcagcctcctgagtagctgggattgcaggcgcccaccaccacacccagctaatttttgtatttttagcaggcacggggtttcaccatgttggccaggctggtcttgaactcctggtctcaggtgatccatccgcctcggcctcccaaaatgctaggattacaggcatgaggcactgtgcctggccctgacctgcatttcaatgcagcctaacatcatattaagtctacacataatcttaggtgaataatgaccaaaattcattgaatgtcctctctgtcctacactgatccaagagctttgtatacaatatcctgttgaatctttccatagcagctctatgagctgctgctcgccaccacctgttcaataaatggtcccagtataactgagcccttcccaaggtcacagtcctacactatattagaattagagcttgagttctagtccatatagttccaaagcccatgctctctccttaagcattgttgcgtccacagagacaaagatgtgtgaaggcagttattcgtaggcatgcttactcttgcgtaaaaatcttaattctgttgttcccttagcactcaacaaatcctaattccatctaaaccttaattttattctagccctaatcatccaccatttgtgttctttactataaacaaaacttaaccttaaatctcactatagctttgtcctagtagttaacctaatctttcatcccaagtccaactctttctccatttccattcctaactctaaattgtatcattaatacatacattccatcattaataaatacattaataatatactctgtcattaatacatcattaattcataaccttagccatttcttaaccctaaaccaaatagatgaattaggaaaggtatcagtgagaccaggctcagtggctcatgcctgtaatcccaaaagggattgggaggctgaggcaggagaattgcctgaggccaggaatttgagaccagcctaggcaacataggaagacccgctctgtaaaaacaagaattaaaaaattaactgatcatggtggtgcgtgcctgtagtcccagctacttggggaggctgaggtgggaggattccttgagcccaggagtttgaggctgcagtgagctatgatcacatcatggcattccagcctgggcaacagagtgagatcttgtctcaaaaaaaaaaaaaaaaaaaaaaaaggaggaaaagaaacatcacttttgtggtaatataaccttaatatctaagctcctgtttatccttaaaactatccaatctccttagacccagttttgatggagtaacagattcaaatttgcataaatcaccaaacggatgtccaagaagagataccttttagctttggcttccccattaggttaagaaagttgttgattatttcctttctatggataagtgagaaccaagaccacccatggctgcatgctactgtctccatgaacatagctttaccgcttcacagtcatcatcaacttgactctactaacccaggaaattcgtgcctgggaagtcacttttattatctgcaaaatgagaatgctaaggctggcatcacagggtttttgtaaagactggagtttattttcatgcaggattgatggtgatgccataccaggtacccaagaaatgtgagctttcttctgctatcatctgagacactaggcaaaaaaatgggctttgaagttagacccgagttggaattctgttgtttcccttaccatctatgtgatcttggacacattagatcatagaagtaataattatcataacataatgaacttttaataagcattttctatgtgccaggcagtattttaagtgcttcacatgaaataactcatctattccatacaataatctctatcaggtaaatgtgattattagcccagttttacacatggacaaactgaggttaatagaagcaaagctgtgattttgatcccaggaagtctaaccttcagaatttgtgctcttaatcaccagtcattactgcctgaaaaccccaaccccttagtcaaattctagctccccatgaaagaccaccaaaggaaattaaaaaaaaaagcctgctaattaggcaagactgagtttattgctcacttccttgacagcatcttaataacgtcttgggctgggcgtggtggctcatgcctgtaatcccagcactgtgggaggccgaggcaggtgaatcacctgaggtcaggagttcaagacctgcctggccaacatggtgaaaccccttctctaataaaaatagaaaaattagcgacgcatggtggtgcatgcctgtaatctcagctactcgggaggctgaggcagaagaatctcttgaacccgggaagtggaggttgcagtgagccgagatcgtaccactgcactccagcctggttgacagagaaagactccatctaaaaaaataaaaaataacgtctcgaagtggggagggaaaactcagcatattgatggggtcttggagtctcgtctaaggtgggtctttcaatgggggatgtgatttggattgtgtaaggatcatgatataatagttaggattggtgttcacagcaaggtgaaatgaccaaagatggggttttaaagagtctaggagagtaaatagtgttttgacacaatcgatatttatgtaactagcttttctggaggcttctggaatgaataatagggctattcgcaactcttatcttcctgggcaagaatttcctagcttagtagagtcaaggtgatggcgaccgcagaaccgtgaagtcgtgttaatagagacagtaagctgtgcacgagttgatagttttggttctcacttatccgtaacattgggataataacgtcatccggaagttgcttggagaatccaatgtgacgttgcctttaatgggataaagcgtggcacagtttgtgtgtcataaatggaagctcttttcatctcctcttcttgacccgtaacctttccataatccttttcagagtatgggggaaattctctcaggaagccctgcatcttcccctccatctacagaaataatgtggtctctgattgcatggaggatgaaagcaacaagctctggtgcccaaccacagagaacatggataaggatggaaagtggagtttctgtgccgacaccagtaatctggggatgggggttgggtgggtgtgggtggagtctttctttcatttgctcaacaaacacctcctgaaaccccactgtgagccaggcactgagttgggcactgaggatctggtgatgaatccggcagacagagttctggctcacgaataatgtcaatgatgtgatatgccacaggctttaaaatccaagagaaaggtgccaaaatgaaatgctcaaaatgttaaacacctaaccatgatgcaaatacagagtaaacacacgccagggtttttaaaaaccccagtgtgagccacgaatggtggctcacgcctataatcccagaactttgggaggctgagatgggaggatcacttgagcctgggaggttgaggctgcagtgagctgtgatcacacctctgtactccagcctgggtgacagagtgagaccttgcgtctaaaataaataaataagcaaacagtgaaatcacccaacaaaaggctcaaacatttggaaaacataatactatactgctaaagtgcacctgttcacagtacaagagctgaagtgagccaaaagagcatccccttgttcccccttgggtgagaacatgtgtgttgggagactcagactcaaatttcctctcctgtgtgtgtccacaaatgaccacagaagcgtcatgagtgtcgatttcatcagtgacaaagtttagcgagttgacgcatttgcacctgtggaatccatgaaagatgaggacactggaattagtcctctgagacaaatcctccatccaccaggtgctcctggtgaccagcattctccttctccctccttcctccagggccctctgtgcttccactctgcccttcttccctattccagtgcctgccctatcttccagcctttctcatgtcctacactcttgatagcttctgagggaagaaaatacccaagacccagtggaaaggaaagggaagtccttgggcaaagaggaactagaaggagttatatttctgcgccactccgggcaaggggtcagtccgaatagctgtgggtgggggggtgtgttgttccaacaacttgggactttcctaaataaaataaattatttctcagctggtcatgggagatgtgacagcaaaaattgagacccatttaccctctgttgcctcaagctgctgtggatagaggcttccagtttgtactatttatggggtcatctttcatgaggacatcatttacgtcctcatctttcatggattccacaggtgcaaatgtgcctactcgctaaactttgtcactcagaaaattgatacttgtggtgcttctgtggtcatttgtggacacacacagagttaggaagtttgagtttgagtctcccaacactcatgttctcagccaagggggaacaagggggtgctctttcggctcatttcagctcttgtactgtgaacaaaattcttctttggcttaggtttaggtcggcattctgagcagtgcccaggcagtgtcttcatgtgtagggtttacccagattttattttttagtttttttttttttttactttttatattttgttttattttattttatttttgagacggaatctcactctgtcgcccaggctggagtgcagtggcgtgatctcggctcactgcaacctccgcctcctgggttcaagcgattcttctgcctcagcctcccaagtagctgggattacaggcgcttggcaccacacctagctaatttttgtatatatgtatttttttagtagagatggggtttcaccacgttggccaggctggtctcaaactcctgacctcaagtcatctgcctgcctcagcctcccaaagtgttgggattacaggcatgagccacaaagcgcagccacattttatattttagagaccggatctccatctgtcacctaggctacagtgcagtggtgcaatcatggctcaatgccgcctcgacctcccaggctccagcaatcctcctgcctcaacctcccgagtagctgggactacaggcatacaccacacccaactaattaaaaaaattttttttgtagggacggggtttcactatgttgcccaggctggtattgaactcctggcttcacatgatcctcctggctcagcctcacaactgagctgggattaaatgcgcgcgattaaatgctgggattaaaggcgcgaaccaccacactcagccccaatttgaaatctagggtgggcctgaagcccacgcctctacgacagtgtgaagcctgaggagtaacctttgttttatccccttctgcttcctaggaatttccgcgttggtccctggctttccttgtcactttccgttcaactataaaaacaagaattattttaactgcactaacgaaggatcaaaggagaaccttgtgtggtgtgcaacttcttacaactacgaccaagaccacacctgggtgtattgctgatgctgaggtgagagcagggaccaacagtggtcatttcacggatgcagaggtgagacaggtgcacaactggtgtgtcactgatgcgaaggcgagatctgctttttcaagcgtgtctgattagcgtcgctgatgtgaaggcgagatctgttgcttttccagcatgtctgattagctgaggttcccagcaatgcgggctcctgttgtcaaagataaggtggagttggggaagactggaacaactccccagattagaaggatgaaagaaattgggatttcccccagaagcaggagagcagagggggattggcaaactttttcagacccaggaaggtatcattccaagtttcaagtctgggaggctttggctgttgatgattagaaaagtggaatttctcaaagtggagcatggtatgaaaaaacaacccagaaaaggggataactgaccagctgtggtgactcacacctgtaatcctagtgctttgggaggccaaggcaggaggatcagttgaggccaggagtttgagaccaccctgggcaatgtagcaagaccctgtctctacaaaaaaaaaaaaaattagttgggtgtgatagcacacatctgtagtcccagctactcaggaggctgaggtcagaggatcccttgaactcaggagttgcagtgagctatgattacaccactgtaccccagcctggggaacagagtgagaccttgtctaagaaagaaaaagagaaagatggacgaaaggaaggaaagaaggaagaaagatgaaggaaggaaggaaagagagagggaggaaaagagagaggaagggaagaaaggagggagggagggaaggaaggaggaagggagggaagaaagaacggaggggaaaggaaggaaggagggaaggaaggagggagggaaggaagaaagaggaaagaaaggaggtagagagagggaggaaagaagaaaggagggaggaaaggaaggaaggagagaagaaaggaaggagagagggaaagaaggaagggagggaggaaggaaagaaggaagggaggaaggaagagaggaaaggagggaggagggagggaggaagtgagggaggagggagggagggaaggaggaagggagaaagtaggaaagggaggagggaaggaatggaggaagggaggagggaagggagggagggaaggaaaagaggaaggaaataaggaaggaagggaggaaggaaagaaggaagaaaagggaagggaaaggaagggaaggaagggagggaggaaggaaggaagggagggagggagggaagaaagggaaggagggaaggaagcaaggaaaggaaggataacccagaagccaagacaccatggtgtgcatccattgcccccatcactgagtagctgaccaagggaaaaatggggtttatttctcttccttcaccatttgggcctcctgccccacctcagcccgctggtcatcaagtacctccacagaaccaactttatccctcttttctttttttcttttttctttcttctttctttatttttttctttttctttattttatttatttattttttttgagacggggtctcactctgtcgcccaggctggagtgcagtggtgcaatctcagctcactgcagcctctgcctcctgggttcaagaaattctcccacctcagcctcctga[221 bp omitted]acattcttcacaaaggaccagctgattgaagcaggtggtgcagagggtatttctaaaggtggttatttaagcttgaaagatgttctccagcctgtagaaatggtctctaaatctcccgcatggatcaactgacctcactgctctgtgacttctggaatctaaataaaaaaagagaagccctttcatcagatgtgtagacaaaaccccatccctcctccctttggggtggaaaaccctggtggttctagcaatgtctgtccttacaatgcatgtggcttatggatgacactaaattagcgggcccttcctgaattttgccttggtaatgaaaatcatcttcctggaatagaggagagggaaaggagggggtttggaactctgggcaccatcttaacagggtagatattaaaaaacacccacagtggcgttcagtctgtggctaggactaggaacagcgtccagcctctgacttctgtccatcacagcagaactggcactttgcaggtccccttccccttagcatagaggtgagattgaggagctcattgttcattgatctccttgctcctatgagctaggcagggatgtgggggtgggggcgtctgattcctctcagctcagctgcttccgactaagtctggaaaaccaatacaaagtcatttttaattcaccttcctctttgagtcaatgcctacttattcattaaactcagatctttgcttctattttcaaggaaaggagaaatatcttcagaggaagactgccgccatactgaggctgagcacagatttgtctttttcattgcatctgtcaagcttaaataaccacctttagaaataccctctgcaccacctgcttcaatcagctggtcctttgtgaagaacgtagagagaatgcggcataaccaccaataaaggagtcttgatttaaccctgggatctgccttttctgcttcctaagatgagaccgatggtgaatgtgtggggaaggaaagattggtagccaggctgtcgagtctcatagtgtggagaggtcagactctcaggccagggacctctaggagtcattacagcctgctctgtcttctgagggaaatcacagatttgggtggggtgtttgtagatacatattaaattattaatgaataaattaggaagtaaacagagggtagaaaattcaccacaagactgcctcaaccattccctccctgtgcccatggcagatatcaagaactgattacagaatctgattccctctcagcccagatggaaattcacattgttgttcttgttctttcttcttcttcctttcactcttcttctccctctcctcctcctccatcttctcctccttctcctccatgtctcctcttactcctctcctactccctcttgtcctccttcttctactcctccctcttctcctcctccctctccacctccttctcctcctccctctccttctcctcctccttctcctcctccctctccttctccttttccctcttcacctcctccttctcctcctccctctccttctccctctcctcctcctccccccgcctccgtgtcttccttgtgctggaattctcttaccccttgtcttcctgcagtctcctcctcccttcactcattgtccgtggaattgcccctgtgatggagatagacgtgggcttcctagatcccccttcaagaaaggacttgctgcccagctccagtgagtgctgtctgcaggcagcctttggtgttcagcccaaatcagagatggtctcagcttcaaaatggcctccctcgcccaaaccatgcccttcccagggtaggccacaactaacgaatgaccaatgctgggtttaaaggcctggctattccagtccaagtgagataactcaaaaagagctacatccagagctcccgtctgttccgctgaggttgtagagcctgcaccgtggctcaacctctccctctgtccaatcccagttccttcccttcccttccataactgatcccaaggaaactccctgataagcctcctgcctgctgtctctgctcttggacagaggaggagccctggggaacccaacctgagacagctcatctttaagagatgcccattctggcagggcatggtgactcatgcctgtaaccccagcactttgggaggccaaggcaggaggatcactggaggccaggagtttgagaccagcttgggcaacatagcaacactctatctccacaaaaaaatacaaaaatcagctgggtttggtggctcacacctgtagttccagctacttgggagactaaggcaggaggattgctttagtccaggagtttgaggctgcagtgagctgtgattgcaccactgcactccagcctgggtgacagagcaagactctgtctgaagaaaaaaatagagagatgtcccttctgaccactctgattaagccccttccccaaattatctttgtatccaaccatcccaatttatcctcaaagtatttgtcccaatctgagctgcttctgatggatttaattttttactcccctggcactggaatgtagcctgcaagaaaccaaaagaccttattgctgggcacattccaggacctagaataatcccaggcatataacatgaaattgtgatgtccaatatagtagccactagccataaggagctagttacatttaacttaagtaattaataacattccttaccgatatggtttggctatgtccccaaccaaatctcatcttgaatgatagctcccacaattctcattccatctacacattcacccatcttccccttcatttcttcagtcacccattcaaaaaagattttctaagtacctggtctatgcctggcattgttccaggtaatggaaatagagcaaggacaaggtatttggcctcaacaagcttatattttgaaacatgcaattcaatagaatcttctgcgaggatggaaatatggtttggccatgtccccacccaaatctcatcttgaattgtagctcccataattcccatgttacctattgatgtggtttggctgtgtccccacccaaatctcatcttgaatcatagctcccgtaattcccacatgttgtgggagaaacctggtggaagataatggaattatgggggaagtttccttcatactgttctcatggtagtgaataagtctcacaagagctgatggttttatagggggaaacccctttctcttggctcttattctatcttgcctgctgctgtgtaagacgtgcctttcaccttccgccatgattgtgaggcctccccagccacgtggaactgtgaggccattatacctttttttctttttctttttctttttttttttttttgagatggagttttgctctttcactcaggctggagtgaagtggcatgatctcggctcactgcaacctccaccccctcaagttcaagtgattctcctgcctcagcctcctgagtagctgggattacaggcatgcaccaccacacccggctaatttttttatttttagtagagatagggtttcaccatgttgatcaggttggtcttgacctcctgacctgagatgatccacccacctcggcctctgaaagtgctaggattacaagcatgagccaccatgcctggcctctttttctttataaattatccagtctcgggtatgtctttatcagcatcatgaaaacagactaatgcacttatgtattcattaataaaactgttctcacttgataaaaataaaataaaatttagtttctcagccttgctcacacatttaatactcagtagtcacatgtggctaccataataaacagcgcgggtctggaatatttctatcctcgcagaagattctattgaattgcatggttctaaaatatgagactgttgaggccaaataccttgtccttgctctatttccattacctgaaacaatgtcaggcatagaccaggtacttagaaaatcttttttgaatgggtgactgaagaaatgaaggggcggatgggtgcatgtgtggatggaatgggatggagctgaggaaagagcttgagattaggaaataacattattctgcttccactttttcttttttagagacagggactcactctgtcacccaggctgagtgcagggtgccatcttggttcactgtaaccttgacttctgagttcaagctttcctcctgcctcagtctcttgagtagctgggatcacaggcacacactgccatgcctggctattttttttttcttttctttctttctttttttttttttttttttttgtagagatagggtctcatgttgccaggctggttgtgaactcccagcctcaagtgaccctccctcctcggcttccccaagggctccactttttcttaatttttttattttataaaacaaagctattggctgggtgtggtggctcacacctgtaatctcagcactttgggggagctgaaaagggtggatagcttgagcccaggagtttgcaaccagcctgggcaacatggcaaaaccctgtctttacaaaaaaaaaaatacaaaaattaaccaggcatggtggcatgcacctatggtcccagctgaggagggtgaggctgaggtgggtggatggcttgagcccgggaggtagacgttgcagtgaggtgagatcactccagcctggacaacagagtgagaccctgtctcaaaaataaatacataaataggctgggtgcagtggctcacgtctgtaatcttagcactttgggaggctgaggcaggcagatcacatgaggtcagttcaagacagcctggccaacatggtgaaaccccatctctacttaaaaaaaaaaaaaaattagctaggcatagtggcacacgagtgcacgcctgtaatcccagctactctggaggctgaggcgtaagaatcgcttgaacccagaaggcggaggttgcagtgagccgaattcgcgccactgcactccagtctgggtgacagagtgagactctgtctcaaaaataaataaataaatgcatgcatacatacataatacataaatacaaaaataaaataaaataaaataaaacaaagctattgaaccagatgactcattttaaacatctaattcatggacttcaaagcaagaaaaagttggaggaaggcatgaagttaattctttattttgacttttattttaacctttgcattgctggagtgtcttgctttgggcggaggtcaggaggaatctctcttttctgtttcatggcacagatcgatgtcaggacgtgagggacggaacagacgacccatctaacagagacacagcctctgggtggtccaggacagaccagcgcggaggtaggaggcttctaggaaagactttgcaacaacctggctgaactggggatttgggggatcctgtcatctctctctttgcatgatgacattttttcaggggattaattccccaaggatcagctagctctaaaccttgataatccagatttgtggtttaattcagtcccctgagtatcttacacaaaggaagggatgtgggaggggagacagagacagacagacagagagagagagagagagagagagagagagagagagagaaaccagacagtgcttccaggaaatcaggaaaaggaaggagttgactttgaatgccacttgcacgagccatttccaagcccagcctcaacaacaactctgtttccagctctgtgactgatttgcatcctttttatttcattttgtatttctatagatttagggagtacaagtgcggttttgttacatggatatattgcgtagtggtgaagtctgggctgttcatgtaaccatcacctgaataaagtataatttgtccccttaccgggagagagaaacgggatttgcaacagttgatgcaggcaggggaagagtagagactacgttctgaaccttttgatacccaacaggagaagagactattttcacccaaggggaagctggggaagagactctggcaggtcacagggacttaggactacgtgaagtgaaaagatgtcaagaatcattggaatttttgggggtggcaactggaccctcccacgcttcctatttccatccacagactcttccttcttaatctagttctgcagacgcccccatcctggcaaagataccgctctgggtctcaccccatgcacagcgccgcatgccaatgccctccctcccgcctgccctccctctctgctttaaggggatctggggcttttgggctttggttctccacaagcgcttgctccatgttgaccaggtggagagggtctggagcttccaggacctcctcagcgagacatcatcttcacaaactctgcaaagaaaaaaaaaaatccccagtaaggcatctcgttgtaaaagcccccaacattattttttgagcccttcctatgtggcaggcactgctggtgatccctgggaaattacttaatccctctatgcttccatttctccatctatgaaatgggaatcagatctctgtggcaagttacttaaccctgtgcctcagtttctcatctgtcaagttggcatgtttaatagatctacctcatgaggttgagataaaattggcttacaggctgggctcggtggctcacgcctgtaatcccagaactttgggaggccgaggtgggcagatcgcttgagcccaggagttcgagaccagcctgggcaacatagcgacacccccaactctacaaaaaaattaaaaaattaaataggtaaataaaatttgctcagaaccgtgcctgccatcacagtcaccccatgtaaactactgtggttattattatgctcctacttctgaaagactaatttcagtatgttgcagtttcttcatttctgttatgaaaataatcttgcatgtaaataaaacattaaatttaaaaaatgggaatcctagtattgctatttccttatatggtttttaagaccattaatggcataatgctcacaaaacagattaagtatcccataaacagctattgttggccgggcgcggtggctcataactgtaatcccagcactttgggacgtca[134 bp omitted]gaggcaggagaattgcttgaacccaggaggtggaggttgcagtgagccaaggttgcaccactgtagtgcagcctgggtgacggagtgagactccatctaaaaaacaaaacccaaaaaacctgtgattgtcactatgagatttcatcatctcaaccatcctggagggataagtgtcactttacagataaggaaacttacgccagcgagggtcaccaacatacctgaggccacgtggatagtgaatggtgaaccctggaaggaatgcaggttgcacctgactttgctgtggctcaagacgatcttgctgcccacccgggtcttgaggtcatcctgaccttcccttgcctttggttggcctgaggatcatctcccacccccaccccaccttctccagatgtcacttgatgtccactgcacacctaatcctggctagatctagcaggtgtccaaccagcctctactgtgtttccatactgggacatacagcatatatggtttagagaatggcccttcctcctctctatctaggatggaggccttggaagctaatacaactcaacacagcaaggtctgctgtgataacttccatggagaggaacagaaaaacttctgtaagacttcacagctgggaggaagacatgagggaaggatggagagaagcttcctgacaaaggttgccttgatgtgagttcctgagggatggatgagactgaaagatgtggtaagtggacggagcatctgatgcctaggaacggaggttggagaacataaagcaggcaccaagtttgtgccagaacttaaaagttcagagaatagctacagaagatacaggctgggtgggtgggcgaggccagatgatggatagacttgcatatcagacaaataattttggactttttttttttttttctggagacggagtctcgctctgtcacccaggctggagtgcagtggggcgatctcactgcaacctccgcctcccaagttcaagcaattctcctgcctcagcctcccaagtagctgggactacaggcacatgccaccacccctggctaactttttgtatttcagtagagatgggtttcacggtgttgcccagtctggtcttgaactcctgagctcaggcaatctgcctgccttagcttcacaaagtgctaggattacaggtgtgagccacgcgcctggcctttttttctttttttctttttttgagatggagtctcactgttgcccgggctggagtgcagtggtgtgacctcggctcactgcagcctccacctcctgggttcaagcaattctcctgcctcagcccccgtatagcctgggactacaggcgtgcactgtcactcctagctaatttgtatatttttagtagagatggggtttcaccacgttggcccccctggtctcgaactcctgacctcaggtgatccgccaaccttggcttcccaaagtgctgaaattacaggcatgagccactgagcccggccagaattttggatttttgtccataagcagcagataggtgctgagatctttgaaccaaagaatgtcacaattagaacttgacatgcttttttttttttttttttggacggagtgttgctctggagtgcaatggcgcgatctcagctcactgcaacctccgcccccagcgttctagcaattctcctgtctcagcctcccaagtagctgggattacaggcacctgccaccacttccggctaatttttttgtattcgtagtagagacaggattt[144 bp omitted]tctcatccatgtagaaccccaatccttttcacttattcagtgatccaatatactcatgctgggctcagtgctaggatttggggatatagtgatgatgaaggaattggtccatggtctcagaaggaaataggcaataaactctagagatgccacgaatccgtattactgcagaagcaagcgggaggtattactggggagccagcagagggacacggagcccagtaagagaggtgggaggtaccttccaggaacataactaggagttagccaggggagaggggaaagggtattccagacggaaggacaacttgagcaaagacagggaaggaaaatttaaaaatacagtggtgctttgtgcatgatttcttttagttttctccaaaaggtgtcatcatccacctcattttacagatgggaaaactgacccttaaagagaaaaagggagtagcataagccacatgctgagtcagcgatgatcctgaatttgaagcccctgaacctgaccccagagctccagctgctagccagtccagtctctttctgatgggacaagttcttcctaggataaaaggtgccctgcaaactaacaaggaatgggcaaggcggaagggcgtcctgagcatgggaaggaaagggccttggctgaggtgttcctcggagccaccagaagtgagcgacacccagctctttgaaatgaatagcctgggaagaaagggacagaacaaatgcttccaaaacctgccacccgcttccattctcaaacttggagaggagtgagaaggagtggccaacttggaaaatctgacagtgagttggaagtggattcctgcggtggctgcccccgctccccaccacgccccgtcaatgtcaccttcaaagtcaactgtgccgtctccattaacatcagcctcccggacaacctcagagatctcccggggggtgagccgctcccccaggagtctctgcatggcctgctgtagctccaccagggtgatctccccatctccattcgtgtcaaactgaatagaagcagaaatagattatatcagcaatgacaatgatgatagccacgagatgatggagtttacctatcgcttactgtgggtcaagcactgagataaaagctttgggaatgtgagccactagaacgtcagctccaaaagacagttttgttctgtttttttttttctttttttctttctttttttttttttttttatttgagacagtctcaccctgtcacccaggctgaagtgcagtggtgcaatctcagctcactgcagccttcacctcctggattcaagcgattctcgtccctcagcctcccgagtagctgggattacaggcgcgcaccaccaaacctgtttaatatttgtatttttagtagagacagggtttcaccatgttggccaggctgatcttgaactcctgacctcagttgatccacctgcctcagcctcctaaagtgctgagattacaggcttgagccactgtgcccggccgaaacttttttttaatgagacggggtctcactattttggccaggttggtcttaaaatcttggccttaagcaacccttccaccttgtccttccaaagtgctaggcttacagtcctgagccaaagtgcccagcgatacatttaaaacttactttttaggtgatttttgaaacatacattattatttactatagttatcctgctgtgcaatagatctcaaaagttattcctcctgtctaaccaaaactttgtaccctttgacaagcaactgtccattccttctctgtggctccccagcctctgctaaccacctttctttttatttgcatgagttcaattttttaagattctgcatgtaacatcatgtggtatttgtccttttgtgcctggcttatatagcttagaataatgtgcttcatgtttattcatgttgttgtaaatgatagagtttccttctttttaaaagctgaatatgccggactcagtggctcatgcctgtaatcccagcactttgggaggccaaggcgggtggatcacctgaggtcaggagttcgagaccagcctgaccaacatggagaaactccgtctttactaaaaatacaaaattagccaggcgtggtggcgcatgcctgtagtcccggctactcgagaggctgaggcaggagaatcgcttgaacctgggaggtggaggttgtggtgagccaagattgtgccattctactccagcctgggcaacaagagcaaaactgtctcaaaaaaagagaaagaaaattttaaatgacccatgctgcttacattgtatttattttggatgacacagctgtaggctgaggaagctgcaagttaacaagtgccgtaaggcaggaaggtgtacttgaggaagaggcagaagtggggagtgtttagggaggcgtgagctggggagaaatgagcatgaaatagacaaggtctcagtgttgcagaaggcagggcccaagtacgtaggggcttgtgtgtcatgggacgttgtcaggatttggttctgagtaagacaagaagccactggagaattttaagcaggggagtgaccagatctgatatacattttaaaagaatgtgagcatgaaaccctgttgtgtagagaacagaccacagtaggaccacgatgggagccaggaaaccaattagagggccgccatgatcatcctggtaggagatggttgtggtttgagccagttagcaccagcagagctcaagaaggagagttcactccccgatgttttggaaattgaacgtactagactttctggtagactagttaagggtgtgcagggcagagctttggaggcagttcattaattcaacacatatgtatccatattgctaaaaaaaaatgtgtcagtagtgcccatgtggaaggcaccgttcttgggactgagcacggagcagcaagcaagacacttagaaatacttgtcttctgtacctggcttatttcacccagcatactgtcctccaggttcatttgtgttgttgtgtggggcaggatttccttcttttgtaaggctgaatattgcatttaaatatataccacgcagaaggagaaatactgcatgattccacttacatatgaagtacttaaaataaccacactcatagaagcagagagtagaaggatagttgctgggggttaggaggacagggaaatggggagatattgtaccatgggtataaagtttcagttacgcaagataggttctagagatctgctgtgtggcattgtgcctataattaataatactgcataatgacaaatattgcttttaatggcaaaatcacaattacttttgcatcaatctaataactatgggcaaaagacgtgaacagccatctctctaaagaggacaaatgggcaaaagacgtgaacagccatctctctaaagaagacaaatgggcaaaagacgtgaacagctatctctctaaagaagacagacaaatggcaaacaagttcgtgaaaaaaatgctcagcatcactaatcatttgggaaatttaaattaaaaccacaatgaaatatcacctcacatctgttaggatggctactgttaaaaagatgaataataacaagtgttggtgaggatgtggataaaagggaaccctggtacacttttgctgggtatggaaattagcacagctattatggaaaatggtatggaggttccttagaaaattaaacctagagctgccatatgacccagcaataccacttctgggtatgtatctaaagtaattgaaatcagtatatcaaagggatgtttgcactcccctgctcatggcagcactattcacaatagccaaggtatggaagcaacctgtgtccatcaaaacagaagagtggataaagaaaacatggcataagtacacaatggaatactattcagcttttttttttttttttttttttttttgaggtggagtttcgctctttttacccaggctggagtgcagtggtgcgatcttggctcactgcaacctctgcctcccgggttcaagcgattcttctgcctcagcctcctgagtacttgggattacacgcatgtaccaccacgcctagctaattttgtatttttagtagagacggggtttctccatgttggtcaggctggtctcaaactcccgacctcaggtgatccacccacctcagcctcccaaagtgctgggattacaggcatgagccactgcacctggccttaaaattttctagtagtgacgtttaaaaaaatgttaaaaggaacaaatgaaactaatttttaatattctcttttatttgacacaatatatctaaagtgttatcctttcatcatgtaatccacttaaaaattattaatttagctatgtaagtagcattctttttatacacactggatttcataaggcagtaagttctaagttcttagtaggtgcttagcatgcttaattaggatacttagcctagaagtttacttaagtatacaagtacgttatgctaattatattagcatactaagtcttaatacagtgttcacgttacacttacagcacttctcaatccagacaactttttctttttgttttgagatggagtttcactcttataacccaggctggaatgcaatggtgcgatctcagctcactgcaacctctgcctcccaggttcaagcaattccctgcctcagcctcccaagtagctgggattacaggcgcccaccaccatgtctggctaaatttttttgcatttttagtagagacggggtttcagcatcttggccaggctggtcttaaagtcctgaccttgtgatccacctgcatcggcctcccaaagtgctgggattatgggtgtgagccactgagcccggccagctgtagatctttataagaagctgggggaggcacttgcacagccaataggtggaggcctcctaggatttgaacccatgtttgcctggttccaaatcctttgctcccaaacactctactactctttattttcaccttgtgttgctgaaagctctcagaacgagaaggtattttatcaggggatataagcaagtctgttattctcactgggtctgatattttttagtatgtctgcagcaagtggttcgtaccagatgaccactttgcattcccttctgggatctcaaattcttggattcttcctgttacaggcactaagaatagaggccctggccaggcacggtggctcatgcctgtaatcccagcactttgggagaccgaggcaggtggatcacttgaggtcaggagttcgagaccagcctggtcaacatggtgaaaccccgtctctacgaaaaatacaaaaattagctgggtgtggtatcgcgcacctgtaatcccagttacttaggaggctgagacaggagactggcttgaacccgggaggcagaggttgtagtgagccgagattgcaccattgcactccagcctggggacaacagtgaaaccccgtctcaaaaaaaaaaagtcctaacatttattctagagatggcaggatcttggataagatttataatcttcatgagcctcacttttctcatctgtttaattgggatacatgactgcttgcttactcctaatgtgtttgtgtgcgtgtttttgtttttgtttgtttgtttttttgaggattaaatcagataaagtatacagaggcattgatccattgcaggtgtttggaatacgttatttttcttccctatttattgatcccaccatggctggaaaaaaaaaggtgggggcctggttggtgggtgctgtccatggcattggctaattacaggcagacctcagagggtctgcctctaccatcaccagcaccatgacactgttaactcacctccttgaaggcatcccgcatctcctggacaccgatcatcccagctgtttctgcaagcaatttgggggtcatcagctccacaaagtcatcaaagtctacacggccacccactgaggaagatggcacaggattagcgagaccccacaagccctggccttccattacctcactttgtgcttcgagtcagttagatcagctcccttctccctgccctataagagccgtctttgacttcctccctccagcagctaactccaagctccaaactcatgtccctctagcctgaacaggagtggatagggtgtggtatggtggaagtaactgcctgtgtgactttcagacagttggttaagatgtttctcctcctctgtagacctgtacaaagaggagcatgaattaaatgagcatacaatttttttttcagatatgaatactatcattaccttgaa[136 bp omitted]aacctctgcctcccgggttcaagcgattctcgtaccttagcctcccgagtagctgggattacaggtgcacgccatcacgcctggctaattttttgtatttttagtagagacggggtgtcaccatgttgcccatgctgttcacaaacccctaacctcaggtgatctgcccacctcagcctcccagagtgctggaattacaggttacaggtgtgagacactgcgcccagcctcaataggaattttattctagctaaaatctaaaaatcagttatgatctccatccaaaaatccatccatcctttttgcagctgtattcaccaacattagctccagctccaagtttgtttccaacatccaatacagctccaatctcgtgctccactgatgaatcttagtggtgatagtaataactacctttaataagaatttactggaggctaagactttaactgcatcagcatctttatctcttccttctcttcctttccacagtcccatgaggtaaggagagaggcatcttcctctatagatgaggaaatggaaactgaagagtagcggataacttcacttttcaaaatgactgtaattagtaaataatagaactgagatttgaacccagacctatctctaaaagcttttaaccacttcaaatgctgccttcctgagtcgaatctgacctgttttcttccagacttctagtccctctcatcctcctctccacccccaactctactcttaacctctacatccttcccaattctgccctgatcccttccctaaccccggccatccctcccattccctggactcacggttcatgcggatttgctggccgagctcaatcagttccatctccgtgggcatgtaacccatcgtcctcatgagattccccagatccttacaagagatgaacccatctcggtccttatcgaactcaagaaatgcttcccgcagctctgaaagttaagagagaactttgggggaacttgaagcagtcagtggggaagagtggcatctcttgaagctatcaatgaggctccaactagagactccttaaaggagcgtacattagaaacaaaacaaaacaaaacaaaaaaaccaaggccggatgtggtggctcatggctgtaatcccagcactttgggaggtcgaggtgggtggatcacctgaggtgaggagtttgaggccagactgaccaacatggcagaaccccatctctactaaatacaaaaaaattagctgggcatggtggctcatgcctttgatcccagctactagggaggctgcctcagccaaggcagaagaatcgcttgaacctgggaggcggaggtagcagtgagaggagatcgtgccattgcactccagcctggcaacaagagcaaaactctgtctcaaaaaagaaaaaaaaattcaaaaaggagtgatgtatgaaatgtgttagcaaaagaggcatcattcctgagaccactaaatgagagcactggcgtccttcagattcctggatgaagttatggggaacctcaaagtcaccaagagagaaactcatttgttttcactcctgagtcttggagatacttgaggatggatatgccttcgaaatactttgggaagtccttcaactgccacgagaaagagttctacaaaattacagttgagtgggaagagagagggattgtaaaaattccatgtaatggaatttatacggaaatgcacaaagggactgagggcaggtcaggtgggtggatggcaacgtggaagcaactggggaagacggtgttaccttcaatctcatcttgtcccagtggtctttcctggaaaggaatgcagatgagagggaatttggagagagggtcacccattctccaaagggtctccttgttctcccaagctcctccccacgctctcgtggttctctttccattctctctctcctcctccatccctcccattccttttcccatctcctgactcctgttccacagttcttggctccccacccccctctcgatgtctctctcccacccacgaatcccaatctccctttttctccctttctgagacaaacacccatcacattgtgtcaaagggggtcttaaacactggggagtccaatctccagatgaaaaaagtgagacttcacaaccacagctaactcattcagagtggtgactctgtgccaggcagtttccacaatcatttcatttaaacctcagtactgctctgtgatgcagatctacatctcgtttccatcttacccatgagaaagctgaggaacagagaggttaaggaacctgcacaaggtcacacagctcacaagcagcagatcccctcccaagggaggaaggcattcacctgctccctggaggtcatggggcaagtcagacacagtattgggatttgaattcagggctcctgactcccaagtcagaattcttcacactagcccccattcactcctttctcacctgcctccaatcttcctgccaaaggttagaatctctgtgcatggaaacagcattcaatggctttcaggcaggagggtcagtgccagcatgaccagttcctaaacactctgagaatgtccagttattgctgccccacctactcctgcacatacctgaagggttgggcttacatatacatggcatgttaacaaggaaattctactgacctctggtctctttagccttcccatctccctttatccctggagcctttccctcagcttctctttcatctgatcccctccttgcggtcccttatcaccctttttttcattctctctctcttttttttttttgagacacagtctcgctctgtcacccaagctggagtgcagtggcacgaactcggctcactgcaacctctgcctcccgggttcaagcgattctcctgcctcagcctcccgagtagctgggattacaggcgcctgccactgcacccggctaatttttgtatttctaatagagacagggtttcaccatcttggccaggctggtcttgacctcctgacctcgtgatccacctgctttggcctcccaaagggctgggatcacaggcgtgagccactgcctggccttttttattctctttttttggtgatcttaaagcctaacaatgaaaagtatgcccacatatctggacaagttggtatatatggaaaaataaaaaaattttaaaaagcatgcccacaggaatcaagcaaacccgaccctgccacttacttttttttaacgagacaaagtctcactttgttgcccaggctggagtgcagtggcataatcagggctcactgcagcctccacttcctgggctcaagcgatcctcctgcctcagccacctgagtagctgggactgcagatgcatgccaccatgctgagctatttttttgtatttttagtagagatggggtcttgtgtttcccaggctggtctcaaactcctggacataagtgatcctcccgcctctgcctcccaagatgctgcgattcaggcatgagccactatacttggccgaccctgccacttactaactgtgtaagcttaaggcaaatgacttcatgactcagagcttcactttcctcacctgtaaaatgggaatgaaagtcactgacctcatgagttgttctgaggtgtaaataacatcaggtgtgcaaatccctttgcacagggctgggcacagaacaatgacttaataagtggcagctattgttattaacgtcatcattatcatcaccaccaccaccatcatcaccaccattatcacaatgagcatccatagaaaagaatgatggtaatctcaacaatgacatcatcccactttcccttttcatttttcttccttttctctccttctctttgctcctgacttttgattttacccccacccatttatctcactggcttacatgaccccaccagggtccttggaatttcttataccttctcagctcctgctctatccacctgttcccctggttctgtggcaccatcatgtccccttctttgtcccacacccctgctccctttgccccgcccaccgcccttccccctcactccccacctcacccgctgtttctcagcaatgcctttcctcaagaagatgcaggcggggcccatggggaactgcatggaggggtggggtggagctcgcagggcaccagtctcaagatggcccctcctccctgctccctgtcggagctcagcctccttatcttctccagcactcctttgccacctcttcctgcctctcttggcttctccttcggtcccggtgtcttagagctgtgacagctgggctggaaatctctacccgggttggggagggaccagagctgtccctgcctccccatctggcttgaatgatatgggtggggaaatgcagagtcaggttctgtgacgcctttatccccagagtggaattggaaagtgcattttataaatggggattagaggctggatgtggtgctcatgtctgtagtcccagcgctttgggaggctgaggtgggaggattgcttgagcccaggagtttgagaccagctgagcaacatacggagaggctgtctttacaaaaaataaaaaaattagccgtgcatggtggcacacacctgtagtcccagctgctccaaaggcagagatgggaggattgcttgagcccaggagttcaaggctgcagtgagctatgattgtaccattgcactccaggctgcagtgaactacgattgcaccattgtactccagcctggctgacatagtgagaccctgtctcgaaaaaaagaaaaaaaaagaaaaaaaagaaaagaaaatggaggattagagcagacggcatcatttattcaatgttccaacaagcatgtgaagggtcactccaacactggcctctgggcagtgagatggagagctcagcacccctggcctcagggagttttcctgggtgagtcgggaatgtgtgagagtgagcaggatgcaagcatggacttcaggaagtgggcgtacacggtgactaagagcatggcatttgctcttcctctgttcatctctttccttctgtctttcctgaatgatttagagggaaaaagcaaggtgggggtgtcagggagggtgtgaagttatggtggtgtcaaagcccaaaggggttttgcgactccacactaggtagggttaggggaggagggggctgggggccatctggcgtggagagccagcattccagtggggtagtggggtgaggagaagtccacatagaggggcagcatgacccagggtgttggggctggagatggtggggataaatccacagatgggcagcttggtgtgcagtgttggaacatgagctgagtggggcgggggcatttatatgcaggcattgtctggggtggaggtttgcactgtaaggcaattaggaaggaggccacatagaggggatctggcatgggttgtcataacccaagcagagagagaaatgtccactcatgggaatagcatggtgtatggtgttgaagccagactaggctgggaaagacatccccacaggggtgaaatggcaaaggaaaagggaaattggctacacacagtgagtaaggggaatgggggccaggtctcctactgttggaaaagggagttactaagacagaaaggaggaaagtcgaatgagccctgtggtgttggactataactggaggcgttggtatgtcctcatggatctcaattatacatagagagataaaaataaacacatagtttcagtgtgtataggaacatttgtacacatattctctagctctctccactaagagaacatagaaacaatgatggcccatatgaatgagcaccactagcatccaaatcttgacttctatataccattctccaccaaatggaaccagagtgcctaggaaatttggctgattccatgtctagagcaaaaaaagaacaagatgagcctacaaacgtcctatgcttaaagcaagaaattgctcaaagtgttgtgagaacatgtggaaagaacacaggagtctgcttgaagaagctccattggccatactgggcagtttgagagtcaaaataaataatgatagtaacaaattatacaggaccacagaagaaaccaggagtccatactcagataaataaaaagctaagtgagaagtttgatatttacagagctcaaaatacctccctacaaaataccaatttcaaaggagttacgttatagtggagaaacgtggcaaacaccatcttagtcaatgaaagtggacatcatcagtaatgtgacaagttggaatttcacaccacctgacaggatgtcacgagaacagcatcgcttctgtaagattcctgaatctcatcataatcagacgtcagacgaacccacatggagggatggtttacaaaataactggcctgtaagcttcaaaaatgtcaaggtcatgaaaatcaaggaaagattgaggaaccgttcgagattggaggagactaagaagacatggccgaggctgggcgcgatggctcacacctgtaatcccagcaatttgggaggctgaggt[132 bp omitted]gaggcagcagaatcgcttaaacccaggaggcggaggttgcagtgagcccaagatcgtgccattgcactccagcctgggcaacaagagcaaaactctgtccaaaaaaaaaaaaaaaaaaaaaaaaaagctacgactgaatgcaacacagaattctgaacaggatccttctgctatcaaggtcttctttcggatgactggtggtttgctggcaatagtttggcggcccttggtcagtagagcctcaccccaatccctgcttccatgttcacatggtttcctctctgtatacatgcctgtctctgtctttaaatcccccccccttttttaaaagaattttatttcaaatctgggatacatgtgctgaacatgcaggtttattacataggtatacatgtgccatgctggtttgctgcaccaatcaacccgtcacctaggtattaagccctgcatgcattagg[137 bp omitted]gctccacctcctgggttcaagcggttctcctgcctcagcctcccgagtagctgggactataggtgtgtgccaccatgcccagctaatttttgtatttttagtagagatgaggtttcaccatgttggtcaggatggtatcaatctcttgactttgtgatccacctgcctcggcctcccaaagtgctgggagtacaggcgtgagccactgcgcccggcgaaatctctccttttcataaggacactagtcattgtggattagggtccacacgagtgacctcatcttcacttgatgacattggtaaagaccttatttccatgcaaggtcacattcacaggcactgggggttacaatggccacatcttttggtgggggtgggacacacaattcatcccataacagtcctgctttaattctggaaagcctgtatgaataataattgctctggaactccgtcggtgccagactaactattctaaggtcttgagactcatgaactcatttaagcctttctaggatacaggctccgtgatggtctattctacagacgatggaactggggcatggaggcgaaggctcttgcccatgttctcatggtaagcagataacagaagtaagatccaaacccagctgtggaaccaccatgcttaattgctgagatatagatggaagaagatggaaaggaaagggggaagggaagaaaggaacaagtaaagggtacacagagggtgaaaagggccgcagcaggggtggtggcagaccaagacacacacacacagctaatccatcagtcaatcagcaagcatttattgagcacttgttgtattctcagagctccacttggctgtggagagatagcccatgatttaagcccaagttcttacttctacagagctaacttgtgcagagctactggctagaagtgcagtcataaaggagcagtggaaggcattggtctgaactatcacattcattctggccatctggacattggacatgatgcttctgattgtcagacactcatgctccagctccaggatctcccgagggacctgcaggacaaatttcaccaccttcagctccttggacgccttcttctgaatgacgctatcaaaatcacagtctagctggtcactggtgattggccctgttaggacagccaaggtgaactcaaggccatgaagcgtgtggctgaagggagtgaagaacaggaaggccaggtggacatcagggccctagtagaccaacaggcccacagtgccctggaagctgaggctcatctatgccaagcagcaacttcgggcactatccttcgggtagtagagcctggggagaaaggaaagttagaagttaccactgtgctttgtaggcagtgttgcacactggataagattagaagacctggaagcctctacaggtcatacatgacttaggagaaagacattcatccattctttcattcattgagaagacctggagctccaccacctcctcctgtggagctcttgtgatctacttttaccacgtaaacgtttatttatccaacactacgcttattaagcatgtatcaggagctgggctaggaggtaactctttggcctacatcgaatgtcatgatacctgccagaattcacaagatctgatctctgtccatctctccaatcacatttcattccgtgcttcccctaccctgatccagcaataacagctttccttctgttcctcgaatagactgatatagtttggaaattcgtcccctccaaatctcatgttgaaatgtgatccccagtgttggaggtggggcccagagggagatgtttggatcatgggagtggatccttcatgaatgggttggtgccttccctgcggtaatgagtgagttcttgctctattagttcacttgagatctggttgttaaaaggaaactggtgctttcctcccttctctctctcttgctctctctcaccatgtaacacgccagccccccttccccttccaccaggattggatgctctctgaagccttcaccagaagtagatacaggcgccatgcttcttgcacagcctacagaaccatgagccaaataaacctctttcctttataaattaccgagcctcagatatgcctttatattagtacagaatgttatagacataggtaagacacagatcaaggtctttcccactccagacactttgcatttacttttcctttgcacagaattctgttccccaagacttcctcatggccaccccttctcagtattcagccccaggtgaaaggtctctccctcaggatgccttcccagacccccagaccctttcctaaaaagctttcactttactcctcagcacaccgcacgttcggtcgtctccatggcacttactctccatggccatcctgttgacttctttgtttacctgtttatgtcatgttgccccccgggaggaggtacattctacaagagcaagagcctcatctgacctgtatgcagccacggctgcaggacctgggcggactggatctagcaggcatccaggaaatgtttgtggaatcaatgaatgaaagaatgaacaccatggtgagcaaagtgatgtggttcctgaccccacactgctgcacaccttattatgaggagagagagtcaacaaataagcataaataagccctgagttctacaggtgagaaggtggggagtggacaggcacagaggaaaatcatgtgtagacacagggaggcaccatctgcaagccaaggagagaggtctcaggagaaaccacccctgttcacaccttgatcttggacttccagcctccagaactgtgagacaataagtgtcggttgtttaagccacctgatctgtggtacttttttctttgagacggaatctccctctgtcagcaggctggagtgcagtggcatgatctgggctcactgcaacctccaccttctgggttcaagcgattctcctgcctcagcctcccaagtaactgggactacaagtgtgcactaccatgcccatctaagttttgtatttttagtagaaatggggctt[131 bp omitted]caaactaatatacaacccctcattagaagacagatgagcagcaaataaccgccctgccccatgccaggcagggcttttggggaaactctctggggaacatagactggtccagaggcccagaatggctttctcttccctctaccttgcgaccctgaggtcattgacccaaactgctcctcagggtgctaattatctcacctagggaccaaccgcacaggagctagggtgggcctttgaaaaggtgactcagataaagctacttccctgctcaaaacttaacagcagcttcccaccatattcagaataatattccaactcttcccctggcttctgtcatctggttgtgtctgtgtctttgtggcaggttgaataatgtctcctaatgatgtccctatcctaatccctagagcctgtgagtatgtgactttttttttttttttttttgagacagggtctcgctctgtcatcgaagctggagtgcagtggtgtgatctgggctcactgcaacctctgctccccagggttcagcaatcctcctacctcagcctcctaaggagctgggaccacaggcatacaccaccatgccttgctatttttttgtacttttagtagagatggtgtcttgccatgttgcccaggctggtctgaactcctgagctcaagagatctgcctgccttagcctcccaaagtgctgggattacaggtgtgagccacggctcctggccagtacatgactttccatggcaaaagggactctgcagatgagattaatctaaggatcctgagatgaggagaggatcctgggtatctgggtgggcccagtggaatcccatggatctttccttataagagcaaggcgggaggtcagagcaaggaggagatgagatgatagaagcaagaggctgaaggaggggccatgagccaaggaatgcgggtggcccctagaagctgaaaaaggcaaggaacagcttctcccctggagcctccgcaggagttggccctgctaacgctttgggttttgctccataacactcgtttcagatttctgacttctagaactgtatgagtccattctcacactgcgataaagacactgcctgagactgggtaacgtataaacaaaagaagtttaactgactcacagttccatgtggctggggaggcctcaggaaacttatcaggttggcgcaaaagtagttgtggtttttgccattacttttagttgcaaaaccgcaattacttttgcaccaacctaatacagtcatggtggaagcagggcaccttcttcacagggtggcaggagagatgagagagagagatcgagagagagagagcaggggaaactgccacttaaaaaccatcagatctcgtgagaactccctcactctcacgagaacagcataagggaagccacccccaagatccaatcacctcccaccaggtccctctcttgacatgtggggattacaattcgagatgagatttgggtggggacacagagccaaaccatatcgatagagtaagttacctgtggagatatctgtggccttttatctgtggcttaggaacaaaaggaaagacagtttcttgcatgactcagcttaattaagctttcagcttaatttttttttttttttttttttttttagaggcaaggtcttgctctgtcgcccagcctggagtggggtggtaccatcatagctcactgcagcctcaaactcctgggctccggcaatcctcccacctcagcctcctgagtagctgagactataggcttgtgctaccacacccagctaatttttaaaattatttgtagagacttggtctcactatgttgcccaggcagatcttgaactcctgggctcaagcgatcctcctgtcttggcttcccaaagtgctgggattacagacatgagccacagtgcccagccacagcttaagtttttccttttggcatagtgaattggggtcctgagatttcattttcctttcacagagatatggtttggctctgtgtccccacccaaatctcatctcaaattgtaattcccatgtgttggggtaggggcctggtgagaggtgattgatgggagcgtacttcccccttgctgttcttgtgatagtgacggagttctcatgaaatccggttgtttgaaagtgtgtagcacttcccgctttgctctctctctctccttctctgccatggtaaagatgtgcttgctcccccttcaccttccaccatgattgtaagtttcctgaggcctcccacccatgcttcctgttaagccttcggaactgtgagtcaattaaacctcttttcttcatcaattacccagtctcaggtagttctttacagcagtgtgaaaacggaccaatatacacggagacaagcgtggaacaaattctccctcacagatcccagaaggaaccagcgctgctgataccatgaattcacacttccagcccccagcaccatgagaccatcaatttctgtgaagccacccagctagtggtattttgttacagcagccctagcaaacgaacacagcctgcttcactcttcagaaaaccattcactcctgaccctgttcatggtctgtcccctgctgagacgcaagctcaagtaggggagacactgcctatcttttttcacccatgcaaccctcctgcctgttgcagagaaagttctccaacagatacttactgaacgagcataggcatcagagcgactatggtctcccacctacccggccacgttcatcaactctctaaggatcttcttcttgttttccctgacattcttcttggctaatgccaagagtagcaccaccacatctagagtgtaggtgtcagcaagcttgaatgtgtcgtatgtgtcactccatgcctcaatatcacctgaagcataaccaaaccaacaaagaaaaggcatcatgagtttggacaattaattctgcagatttttgtctatttacatcagggcttggcaaactacagttgtggaccaaatccagtcggcccactactttggctttataaataaagttttattgacacatgaggtt[131 bp omitted]tgtaacctccacctcctagattcaagcgattctcctgcctcagcctcccaagtagctaggattacaggcgtgcatcaccacgcttggctaattttttgtattttttaatagagacggggtttcaccctgttgg[136 bp omitted]ggaaccatggctgatgcagcataggtaaccaataaatgttcgttaaatgaaggaagaaaacagacacaatttatccctaatgggagtctcatcgcaggagacacgattgacaagctaaaaggagcccactgtgggaagtggcacaatcaggccccggaggaccacccatcctggatgctaggccttccaagcagctgctcacctgagactggatgaggaatgtgggatgcccaggtggaaggggttggatattcaggtaggacaagaaggctgcagagagaggcagcaacatgcataaacatgcaagaccgagagaggcagcctggcatcctccaggcccaagggtggacaggatgactcactcaaccatcagatgttggagcgtaacaagatgtccccagggcacagcacagctccattcggcctggcctggtggtgatatggtttggctgtgtccccacccaaatctcatcttgaattgtagttcccataatccccaagtgtcgtgggaggtaattgaagcatggaagtggttaccctcatgctgttctcgtgacagtgagttgagttctcacgagacctgatggtatgtatttatttatttatttgagaaggagtcttgctctgtccccaggctggagtgcaggagcgcgatctcagctcactgcaacctccgcctcccaggttcaagcgattctcctgcctcagcctcctgagtagctgggattacaggcacgcaccaccaagcccagcaatttatttttttttgttgttgtatttttagtagagatggggtttcactgtgttagccaggatggtctcaatctcctgaccttgtgatccgcccgcctcagcctcccaaagtgctgggattacaggcatgagccaccgcgcccggctgatctgatgattttataagcatctggcaattgccctgctggcactcacttctccttcctgccgccttgtgaagaaggtgacttgcttggccttcgctttccaccatgactgtaagtttcctgaggcctctcaatccatgctgaactgtgagtcaattaaaccttcttcctttgtaaattacccagtctcaggtatgtttttattagcagtgtgagcatggactaatacaggtggcttctcacctgctcctcccctgcacctacctccacaggcatctatgttgaacaggggaaaatgcatcaccactggtccagtttctcctttcaggatgtagcagctggcgggggccttggaccacaaatccagctcagcctcttctacttggggaaaggggatcttgtggcggcggcagtagtcagtggtagcccggatggtctgagaaggaggcaataagaaatggttgcaagacctctccagaagacccctccagaagacccctggggcctggagacccaatgggacctcagctaacagcccagacacacaacagagcaagggtcagcttggacagggacaacatcttctgtaagggaaagagtaagcctctgccatcacccgcactccccagcccacctagagacaacattcgcgaggttagagagtaacctttggggctgggggctgcgggactcagagggcaaggaaaatggtgcctagatgaggctttgaatcccagctctgccacagaaagatgttggagacctcatctctacagtatatatatatatatatatatttcaattagccaggcatgggggcgtgcacctgtagccctagctactcaggaagctgagatgggaagatcatttgagcccaggagcccaacgagatatgtggtatgggtgcatctcatcacctctgcaaaggatctctgtaatagccacctcacaggggtatttggaagataaatgagatattctccatcatcactgtgtaacagaaatataatgtcaccgtgaaggtacttttcttttcttatttttgaggcagagtttcactcttgttgcccaggctggagtgcaatggcatgatctcagctcactgcaacctccgcctccctggtccaagcgattctcctgcctcccgagtagctgggattacagacatgctccaccacgcccggctaatttcatatatttagtagagacagggtttctccatgttggtcaggttggtgatcctcaggtgatccgctcgtctcagtctcccaaagtgctgggattacaggcatgagccaccgcgcccggccgtaaaggtacttttcaattgtctacttgctgcacttgaagaaagtaaaaagaagtaggagaaattaattttaaaaataaatattaaataaaggtgacaccatggggaaacttaatgagaagtagtttctcagttgtaacaagtttcatttattctctttcctgtggcctccttccgtgctgtcctgaaccagagcaaaaggacactgcatgtctcattactgtagcactgaggttactaaacttacataaaacacatctcagtctctgtgtcttagaaaggcatctgttaagtcctgcaagctgactgacaaaactaagcaaggagaattaagatcaatgcgggccaggcgtggtggctcatgtctgtaatcccagcactttgggaggcca[134 bp omitted]gagacaggagaatcgcttgaacccgggaggcagaggttgcagtgagcccagatagcgccattgcactccaacctgggtgacaagagcaagaaagaggctgggcat[142 bp omitted]gtggcacatgcctgtagtcctagctacttgggaggctgagacaggagaatcgcttgaacatgggaggcagaga[135 bp omitted]tctcacttctaagtgggagctgaatgatgagaacacatggacacacagaggagaacaacacacactggggcctagtgttgggtggagagcgggaggaaggagagggtcagcagaaataactaatgggtactaggcttaatactggggcgatgaaataatcggtacaacaaatccccaggacacaagtttacctatggaacaaacctgtacttgaacccctgaacttaaaagttaaaaaaagatcagtgtgtttgtgttttgcacacaaatgcagaagttgcataagcatatgacttcatagttgtgatctcaagaaaaagggcatttctcctttatcttgttcttgcagttaacgtaagaatattttaaatttctaagtttctgaagtgttagaggaagagatggcccagtagagatgtcggagtaatgtcttatccttttaacatgtggttatttttccttatgtactcaaaggtggcttctttattcagaggagtgatattacaactagaaaccactcattagcaaaaggagatgcagtctcaacaagtgtttcttcttcttcttcttcttcttcttcttttttttttttttttttttttttttgacagagtctcgctctgttgcccaggctggagtgcagtggcgggatcttggctcattgcaacctccgcctcccagattcaagcgattctcctgcctcagccccactagcagctgggattacaggcacgtgccaccatgcctggctaatttttgtatttttagtagagacagggtttcgccatgttggccaggctggtctcaaacacctgacctcaggtgatccacctgcctctacctcccaaagtgctgggattacaggtgtgagccaccgcacccggcttcttcttattttatattgagttgaatatttgagtctaacagttttctacatatacttatctttagagacaggatcttgctgtgtcgcccaggctggagtgcagtggtgcaatcatggctcactgcagcctcaagctcctagactcaggttatcccatctcaacctcctaagtagctgggactacagg[137 bp omitted]catggagcaatcccatctctactaaaaatacaaaaattagctgggtgtggtggcgcatgcctgtaatcctagctacttgtgaggctgaggcaggagaatcgcttgaacctggaaggtggaggttgtggcaagccgatatcgtgccattgcactccagcccgggcaacaagagcgaaactccgtctcaaaaaaaaaaaaaatttgtgtggagatggggtcttgctatgttgcccaggctggtctcaaattgctgatctcaagtgatcctcccaccttggcctcccaaagcactgagattacaggagtgagccaccgtacccagccacttttctacacataaaacagaaatatcatgaaggtgcttcatacctgtattacagaggaatttactgtcataagtaccttctaaagatttgacattcagctgggcacagtggctcatgcctataatcccagcactttggaaggctgaggtgggcggatcacctgaggtcaggagttcaagaccagcctggccaaaatggcaaaaccccgtctctactaaaaatacagaaattagccgggcatggtggcgggcgcctgtaatcccagctactcaggaggctgaggcaagagaatcacttgaacccgggaggcgaaggttgcagtgagccaagatcgcaccacagcacaccagcctgggcgacacagaagactccatctcaaaaaaaaaaaaaagatttgacattcaactatagtagctacatgttggttagtttccttataagccccatcatggaaagaattaaagatgaatttgagaaaaatgaaaaaaaacttagacaatcaggttctgttaaattgttacagatatgtcttgcttaaatttctgtttattggccgggcgtggtggctcacgcctgtaatccctgcactttgggaggc[134 bp omitted]gaggcaggagaattgcttgaacccaggaggt[134 bp omitted]catgcaatatgtcaaaagtgtgattgcctcgatgtgtaatcaattgtgatggtgaatattaggtgtcgacttgattgaagggtgcctggaaagctggtattgtttccggatgtgtctctgagggtgctgtcagaggagatgaacatttgagtcagtggactaggagaggaagactcacccacagtgtgggcggacaccctccaattggctgccagtgtgactagaacaaagcagacagaagaaggtgggagaagctggcttgctgggtcctctggctttcatctttctcctgtgctggatacttcctgcccttgaacatcacactccaggttttttggcctttggacccttagacttacaccagtggctcgccaggggctctacggcctttggctacagactgaaggctgcactgtgggcttccctactttttttttttttttttttttgagatggaattttgctcttgttcaccaggctggagtgcaatggcacaatcttggttcactgcaacctccgcctcctgggttcaagtgattctcctgcctcagcctcccgagtagctgggattacaggcacctgccaccacgcccagctaatttttttgtatttttagtagagacgggatttcaccaggttgaccaggctggtctcgaactcctgatcttctgatccacccgcctcggcctcccaaaatgctgagattacaggcgtgagccaccaggcctggctgggcttccctacttttgaggctttcggactcggactgagccactattggtttgtttcttcctcagctcgcagacggcctattgtaggactccaccttgtgatcctgaaactccctttcatctagacatagatcctattggttctgtccctctggagagccctgcctagtatgtcaatataccaattacgaataaggtctttgacatgcattttccatactcggtcattaaaatccgaggtgtattttatcttcatagcacacttcaacttgggccaggcacatttcaagtcctcaagtgccacatgtggccggcaaccactgtagtggacagcttaggtctctgaagtcgtctttgattgaagtttaacaaatgctgccggttttcttcctattactcttgctattctcatcatcaccagataagcattgttgttaatccagaacaccagctatggaccaggcatggtgcagagactctgcagatctcctgcgagccagatgatgtgattcccattttcaggatgagaaaactgaggttcagaggttaagcctatcgctcggggtcatgcagcagagatttggcagaaaaggactcccaagaccttgatatctcattccacctttatcatattgtcttgggatatttatttcagcagaaatcctaagaccagaaagcctgggtattcctgggccaagggtctagaaagatggtgacaagttggttctggatcatggtatggggaggaggatggatgttcctaattcatattacagaatgtaaactgatagaagtgtgtgaatataaatatatattacattacacataaatataatagatgatatgttttaccatgattattttatatatactactatgtattggtatgtatcatgtaatagatatagttatatattatgtaggtgtatatattttttaataaaatagctgggcagggcggcttgtgcctgtaatcctagccttgggtggtgggagaatcgcttgaggccaggagttcaagaccagcctgggcaacatagcaagaccctgtctctaaaacaatttagaaaactagcctggtgtggtggtgtgtgcctgcagtcccagctacttgggagggtgaggtgggaggatcgcttgagcccaggaggttgaggctgcagtgagctatgatcacaccataagacccagtctcgaaaggaggccatgaggggaggggaagggaggggaggaaaatgtttataaaccccacagtaagtggcagatactgtgctaagcacttcacatgtattaacaagtattaatttaatccacagaacaactcctggtggagccatcgttagcccaattttacagctgaggaaaccgacatgcacagaagttacgcacattggatcaggccacacagctggtaagtggcagagctgggatatgaaggcagggagaacggatcctagtggccactgggaaggtgcaatatgtactaagacaaatatacttgcatatgttctcactcagcaaacatttattgagggccactatttgcccaggaaacccagatgagcaggaagacacgcgctcggggctggagacgtgcacacccggggaaggaggtgcacaggtgaggagctaggctgttgcagttcaaactggtatgaatgggcaggcaggacgcagaagcggggagagtcatctgccaggaagaggggcccgggaaggtctgggatggctttggatcagaagttcgttggatgtggccgaccgcgggtgcttcgggagcgatgggtgagttgatttggctctctggacttcccagccagcacctccccattgcccgcttcccagcccgcgtcctcagttcctccgcaaagtcagcttcgccgcagcccacctcccacccaggaccggccccaaagcccttctcgattacctcgaaaggatctccggcactgaagtcgaaggagaggatgaggtgaacctcccgcgtcgggggcagcacgagtgggaagggagtgttgatggctaaaccagcatccaccaggtggaggtgcttccggctgctcattatcttgtcccggatgccacctgtggtgcccaggaagaaagaggatcagctgcttctggggactgaaagcaagacttggaaatggaaggcagagagggggatgggaaaatgatcgttgtcagtgtagacagcagttgtgaggttgccaactaggagctgacttctctctcttcccagattcatatgttgaagccctggctgggtgcggtgcctcacacctgaaatcccagcactttgggggctgaggcaggtggatcacttgaggtcaggagttcaagatcagcctggccaacacagtgaaaccctgtctctactaaaaatatcaaaattagccaggcgtggtggcgggtgcctgtaatcacagctacttgggaggctgaggcaggaggatcacttgaacccatgagccggaggttgcagtgagctgagatcgcgccactgcactccagcctgggtgacagagcgagactctatctcaaataaataaacaaataaacagacaaacacatgttgaagctcttacctccagtacctcagaatgtgactgtatttggagacagggtctttaaagaggtaattaaggtaaaatggggtttttggcgtgaagttccaaatgaagctgccttctcagcagcaatatgtgagagtgttgttaacccaatgtttctgagacaggtctcggtcagtgtagaaagtttattttgccaaggttaaggatgcacaaccgtgacacagcctcaggaggtcatgatgacatgtgcccaaggcggttggggcacagcttggtttagacattttaggaagacccgagatgtcaatatatgtaagatgaacactggttcggtctggaaaggtgggacaactcaaagcagggagggggcttccaggtcacaggtagataagaagtgaatggttgcattctttttttttgagaaggagtctcgttctgttgcccaggcgggagtgcagtggcgcaatctccactcactgcaacctccacctcctggcttcaagtgattctctgcctcagcctcccaagtagctgggattacaggcacccgccaccatgctgagctaatttttgtatttctagtagagacaaggtttccccatcttggcaaggctggtcttgaactcctgacctcgtgatctacccgcttctgcctcccaaagtgctggcattacaggcgtgagccacgggccggccaacattctttagagtttccattagcctttccaactggaggcaatcagatacgcatttatctcagtgagcagagggtgactttgaatagaatgggaggcaggtttgccctgggcagttcccagcttgacttttccctttaacttggtgattttggggtcccgagatttattttcctttcacagcgtaaaccaaaaataaaatgataagcccctcccccccacccccatccctcccgtccccccgccaacaccctccccaactcctacccccccacaacaccaccccaaccatctgaatgaacccttcctcttggccagggcaccccagagttaacctgaaaacctagttctggccgtgacaggaagggagggtcagacatgcctcacgatgccctcctccctttggggatttaaggaaagctgaccagcatttaatatccacccagagcttaagtctgacaagaatcatttacaatctattctctctgaagcttgctacctggagccttcatcagttactggaaaggggtcctgatccagaccccaagaaagggttcttggatctcatacaagaaagaattcagggtgagtccacagtgcaaagcgaaagcaagtctgttaagaaagcaaaggggtgaaagaatcgttactccacagagtagggtgttacggaaagtaagaggagaaatgcaaccacctcctccttttgttatatataggaaaacaacaacaacaaaaaaacatggggagatgtgctctgctacaag[139 bp omitted]atggtgaaatcctgtctctactaaaaacacaaaaattagccaggcgtggtggcacctgcctgtaatctcagctactcgggaggctgaggcaggagaatcgcttgaacccgggaggcggaggttgcagtaatctgagattgtgccactgcactctagcctgggcaacaaagagcaaaactctgtctcaaaaaaaaaaaaaaccaaaaaccataattactatattttacaagaacttatattattatttttaaagcaaaattaggaatgcgtctgttctcaagatatcaggatatcaggacattcctgggtctgagtctgtttagtaaacattatgaatctgttcccttaaccataaccatctagaggctaggaatgcctaacttcctggggatacagcccagcaaggctgagcctcatttttcctagccctcattcaagatagagtcactctggttccaatgcctctcacacatctgcatgataaaactttgaaacattccaatagaatgactagtgctcttctaagaagaggggattagaacagagacacacatggagcaaagaccatacgaggatatgagaaggtggctgtctgcaaatcacagagagagtcctcagaaagaactcaccccacagacaacttgattttggacttccagccttgagaactgtgagaaaataaatgtctgtcgtttaagtcacccagtctgtgggattttgtcacagcagcctgagcagactaagacagtacctctgggaatggttcctcttgctgatgaaaagagtcaaactctggaaaatatttgaagaggtttattctgagccaaatgtgagtgaccaatggcccgtgacacagtcctcaggagatcctgagaacatgtggcctaggtggttggggcacagcctaggtttatacattttagggagatatgagacatcaatcaaatatatctaagatataccttggttcggtccagaaaggtgagacgacttgaagtcatggaggggtagaggtgaggggtgaggaggggtcgggggggggcttccaggttataggtagatttaaagttttctgattgacggttgggcacagtggctcacacctgtgcacctataatcccagcactttgggaggccaaggtgggcagatcatttgaggttaggagtttgagaccagcctagccaatgtggtgaaaccctgtctctactaaaaatacaaaaatcagttgagcatggtgacatgtgcctgtaatcccagctactcaggaggctgaggtggtggttgcagtgagccaagattgtaccactgtactgcagcctgggtgacagagcgagactccatcgcaaaataaataaataaataaataaaaataattaataaataaatatatggaaaataaaataaaaatatctgattggctattggtttaaagagttattagcaatagaaaggaatgtctgggttatgacaaggggttgtggagaccaaagttttatcacgtatatgatgcctccaggtagcaggcttcagagagaacagaatgtaaatgtttcttatcagacttaaaatctgtgttgaggtggctcacgcctgtaatcccaacactttgggaggccaaggtgggtagatcacgaggtcaggagtttgagaccagcctgaccaacatggagaaaccctgtctctactaaaaatacaaaattagccaggcgtggtggcgcatgcctgtaatcccagctactcgggaggcaggagaatcgcttaaacccaggaggcggaggttgcggtgagctgagatcgcgccattgcactccagcctgggcaaaaagagcaaaactccatctcaaaaaaaaaaaaaaaaatttgtgttgacatgactgctagtcagcttttcctgaattccaaaagggaggagggtataaggaggcatgtccgacccccacttcccatcagggactgaacccatttttcaggttaactttggagtgccctggctgacaggagaggtctattcagatggttgggtggtggggggcttagaattttatttttggtttacactctcatatattgctactgagaaagcgacttcatccaaccccttcagggagaaatttgatgctaaaacactcatcgccatgatccagtgacttgatgcttgatggtgtattccgaggccataagacccggcagctgcatggcatggtgcgcagacacagctgaagtcctgtgtgccttgtaggaagcaccccaggagaggtgagcaggactgacatccagccagggttcccttcccaggccacacacagccctggccaggggggcacattttggaattcacccccctggaagatgcaccttttctcgatttgcacaagggcaacaggaccacaaacataaagatgttcacgatagtcttgtaacaaaagagtggggaaggccaggtgtggggtggctcacacctgtaatcccagcactttgggaggctgaggtgggaggatcgcttgagcccaggggttcaagatcagtctgggcaacatagtgagaccccatctctatgaaaaagaaaaagaaaaattagccaggcatggtgctgtgtgcctgtgttcccagctattcgggaggctgaaatgggaggattgcttgagctggggaggctgaggctgcagtgagccatgattgcaccactgcattcccacctgggcaacagagcaagacacacacacacacacacacacacacacacatacacatacatgagtggtgcagggattggcatggtcataggagaggatctccaccagctatgaacattggagcttatggagactattaaatggcctcagtgtgagttcccaggagtctgacatcaattccacctgaatgagagggtcagtcccctgaagggaaaacccatacaaatgtgtgttgttttttttttttttagatggtgtctcgctctgttgccaggctggagtgcagtgggatgatcgcggctcactgcaacctctgcctcctgggttcaaacgattctcctgcctcagcctcctgagtagctgggactacaggcacccgccaccctgtccggctaatttttgtatttttagtagggacagggttttaccatgttggccaagctagtcttgaactcctgacctcaagtgatccgcccgcctcagcctcccaaagtgctgggattacaggcatgagccactgcgcccagcccatacaagtgtttttgaagaccaggtcctaggactagctgacaagaaattagggttttttgcatttttgcaaaaccagagaaagccatcagtgaggcttttcacgatgactgggactcgcagcgaggccacacatttttcagtatggaccacaccactgagcgaaagttcccctaatcagatccctgggccctttgacaccacccccctccaaagctctggggaaggaccagcctgggattgtttcaggcccacccccttcccctactccagcccattcacacgcaaggacagaccagggcggtgggaagagggtcttctcaccgtgtttgtacaggaagttgtgagtggtcccccattcccactttgaagcgcaaatgcctgttttcttcacaaaatccatcaagttactgagtgagcctagggaaagaagccgagacagccaaggtgagttcaggagactgagtggtttctgcccccaccaaagtcatatgtggaagccctcatcccccatggggttgtatctggagacaggacttttaaagaggtcattcagggccggcgcgttggctcacgccagtcatcccagcactttgggaggccgaggcagaaggatcaccatatcaagagatcgagaccatcctggccaacatggtgaaaccctgtctctactaaaaatacaaaaattagctgggcgtggtggtggcgcatgcctgtagtcccagctactggggaggctgaggcaggagaatcgcttgaacctgggaggcagaggctgaagtgagccgagatcgtgccactgaactccagcctgatgacggagcgagactccatctcaaaaaaaaaaaaaaaaaaaaaagtgggggggtcattcaggataactgaggtcatgagagtgggatcctaattcaataggactggggtctttatgagaagagaaagagtgccaggcaccagagtaatcccaggacttagggaagccgaggtgggaggattgcttgagcccagaagtttgagaccagcttgggcaagagagcgagaccacatctttacaaaaataaaataaaataaacaaattagctgggcatattaatgcatgcctgtggtcccagctattcagaaggctgaggcaggaggatcacttgaacccagtagttcaaggctgaagtgaactatgtatgattgtgccactgcactccagcctgggcattccagcctcacttgtatcactcagatcatttagatacaagggagaccttgtatctaaaaaaaaaaaaaaaagaaaaaaaggaagacaccaagaataccaagaatgcgtgtgcactgaggaaaggctgggctgagaggatgcggtgagaaggcggccatccctctgcaagccatggagagaggcctcaggagaaactgaccccactggcaccttgatcttggacttcctgcctgcagaattgtaagaaaataaggctgggcacagtgactcacatctgtaattccagcactctgggaggcccaggtgggtgggtcacttgaggtcaggggttcgagaccagcctgggcaacatggtgaaaccccatctcaaaaaaaaaaaaaaaaacggtgaggaaataaaagcctatagttgaagccaccccacttcaacttttgttagggcagcagagctgacaaatctggtgagctgggaaaggttggcatacaggggcctgggggtcctggccgtcagatccagcatctatcattgagccacaggtgagatgactttgagccattggggttgggggagttggcaaggaaaagatggcgatttaatgactgtatgatcacctgtgtatctggggaaatgagcttgttctctttaggttcatgggggagaacgacgcagaatgttccaggagctgttccaaaatgcccagcacactttcccgtgctcccttccccagcccaagaggctgccaagtcagtcagggataaaccaggtcattatcccagacgcctgcctcttcctcaccctcaccctggactatcaccaagacctgccaattccacctcctcttcagtgtctctgctcctcccaatctcatctgccagtaccttatgcagcatcttttccatccaggatgcaacactgcctccccctctgatttccctcttcctggtttttcagctccaatcctttctctgaacagcaggggcagagtggcaagagagcaaagctagtagggaggtgggtgcttgagctagatgctgatttgaatttgacttcatcactcattagctgtgtgaccctgagcaagttacttttatttatttattttttcttgagacagtcttgctctgtcacccaggctgtagtgcagtggtgcaatctcggctcactgcaacctccgcctcctgcgctcaagtgattctcctgcctcagcctcccaaatagctaggaccacaggcacccaccactacgcccggctaaatatttttttgtatttgtagtagagacggggtttcgctatgttggtcaggctggtctcgaactcctgacctcaggtgattcacccacttcggcctcccaaagtgctaggattacaaacatgagccactgcaccgggcccctgagcaagttacttaacatctctgttctcatctgtaaaaccaggaagagagtaacacctatcccttatagatttatgaggaataagtaagagcctgcctatagcacttaggatgttgggaggatggtttaacatgtcaactaggctgggccacagtaaccagttatttaatcaaacactagcctagatgtggctgtgaaggtattttgtagatgtggttgacagctaaaatcagttgacttcaagaagattattctcagtaatgtgggtgggtctcatctactcagttgaaggctttgagggcaaaacagtttctagagaagaagaaattctacctccagactggagcgtcaaattctgcctcatgcatgcgtatgctcattgcagcactattcacaatagcaaagacatggaatcaaccaaatatacccatcaatggtagactggataaggaaaatgtggcacatatacaccatggaatactatgcagccagaaaaaggaacaagatcatgtcctttgcagggacagggatggagctggaagccattatcctcagcaaactaatgcaggaacagaaaaccaaacaccacatgttctcacttataagtggcagctgaatgatgagaatatatggacacagggaggggaacaacacacactggggcctgttgagggggcggtgggagggaaaacatcagggtaaacagctaatgcatgtggggcttaatatctaggtgatgggttgataagtgcagcaaaccaccatggcatacgtttacctgggtaacaaacctgcatgtcctgcacatgtatcctcaaactttaaattaaattaaattttaaaaaatcctgtctcggtttccgcctgttggcctgccccatggattttggacttgtcatcttcacaatcccatgagccaatttgttaaaataaatatctctagttagatagatagagatagatagctataaatacatagatatagatgcatagatttgggcagacagagacatagataggtagatatagatagatagatatcttattggctctgtttctctgaagaaacctaacacatccagcaaatagtaggcacttaataaatattaacttctacaagagtttagcagcagaaaagcaaatcacacctacattgctttgatagccctttaatatttaacatgttaaagaaaactaaatgtggcctgaggactccatacttcttctttttttttgagacagagtttcactcttgttgcccaggctggagtgcaatggcgtgatctcagctcactgcaacctccgcctcccgggttcaagcgattctcctgcctcagcctcccaagtagctaggattacaggcatgtgccaccacgcccggcgaattttgtatttttgcatttttagtagagacagagtttgccatgttggccaggctggtctcaagctcctgacctcaagcgatccgcccaccttggcctctcaaagtgctgggattaaagccatgagccaccacacccggccattctatcttatatttttatttatttattttagagaggaggtctcactacgttgcccaggcttgctggtcttgaactcctggcctcaagcgaccctcccgcctcagcctcctgagtagctgggactacaggcgtgagccatcacacctggcttttttaaatgttttatctatttattaattttgtttaaaaaagatgaggtctcacagtgttttccaggctagtcttgaatacctgggctcaagtatatcttatagtaagttaagaattggccgggcacagtggctcacatctgtaatcccagcactttgggagcctgaggtgggcggatcacaaggtcaggagttcaagaccagcctggccaatatgatgaaaccctgtctctactaaaattacaaaaattagccgggtgtggtggtgcatgcctgtggtcccagctactcgggaggctgaggcaggagaatcgcttgaacccgggaggcagaggttgcagtgagccaagattgcaccaccgcactccagcttgggtgacagagcgagactccatctcaaacaaacaaacaaaaacaaaaaacaaaacaaaaaaaagtacgttttttaaaagaaaactttttaagggatgggggtctcactctgagtgcagtggtgcattcatagctcactgcagcctccaactcctgggcttaaggaatcctcccacctcagcctccccgaatagctgggactacaggtgcacgcaccaccatggccggctaggatgcatgttctcatttcagcacaggagccaggcattatagaaagtcatagtgaggcttcgtgtggcacattccatctctctccattacccaccggaggggtaaacccaagcctctcatctgccagactgaagtcagtagatgaactctggctgactttccccacatttccacttggtaggctcattgtcactcattcttcaagttgcttctgagctatcaccttggaaaaggaggcttcttcattaatcccatctaaggggagcttggccaacaatagctcagagacatcaagttaatagtcggctccctctttaaattgtagacaaaggaaaccagagaatagactgatttcatccaacagagataaaaacaggaatttatgtaacatgaataaaaggaggaggaagggaaatctagagtctgaagagagtacaccttgatttcctttccttggtgagctgctgatgagctggtcaggaggactctgggtgtgtctgtgcctggacaccgggtcatcacagaggtgagaggttggatgtctgggggtgagactggctgtacctgggtcatctcaggaaggcagtggcttcagcgaccaactgtcttcattgtccctcatccacgctacttcactctcagaatttttcaccggatacctgctctcgcctctccttgtctctccatataatttacttatttattattttttcgagacagggtcttgctctgtcacccaggctggaatgcagtggcacaatcatagttcactacagcctcgacctcttgggctcaagtgatcctcctgcctcagcctcctgagtagctgggaccatgggaacgcactaccatgtccagctaattttttacaaaaaattttgtagagatggggtcttgctatgttgcccaagctggttttgaactcctgggctcaagtgatcttcctgcctcagcctcccaaagtgctgggattacaggtgtgagccactgcacccagccctctccatagaaattagcccagtcggggatggacttgcctgtggttggcttacctgtctattctccatctcgtcctctagaccatgagtcctccaggcaggcacttggtctgacatttcccctttgtcacccctacccccagcctgctagtaggagagttattatttcatgctaatgactcaagacatcctagatggatggatggccggttgggtggatagagggtgggcgtatcagtccattcttgcattactataaagaagtacctgaggttggataatttataaagaaaagaggtttaattgtctcacagttctggatgctgtacaggaagcgtggtgctggcatctgcttctggtggggcctcaggaagcttccaatcatgatggaaagtgaatggggagcaggcacatcacttgccgagagcaggagcaagagagcgagggggaaggtgccacacacttctaaacaaccgtatctcacatgaactcagagcaagcacttactaatcaccaagaggatgacgctaagccattcatgagggatccgcccccatgatccaatcacctcccaccaggccccacctccaacactggggattacatttctttttcttttaatttaatttaatttaatttaattttaagttccgggacacatgtgcaggacgtgtagatttgttacacaggtaaacatgtgccatggcggtttgctgcacctatcaacccatcacataggtattaagccccacatgcattagctaattttcctggtgctcttcttctccccacccgcccccaacaggccccagtgtgtgttgttcccctccctgcgtccatgtgttctcatcattcagctcccacttataagtgagaacatgtggtgtttggttttctgttcctgcaatagtttgctgaggataatgacttccagctccacccatatccctgcagaggacatgatcttgttcctttttctggctgcatagtattccatggtgtatatgtaccacattttctttatccagtctatcactgatgggcatttgggttgattccatgtctttgatattgtgaatagtgctgcagtgaacatacatgtgcctgtatctttctaacagaatgatttacattcctttgggcatatacccagtaatgggattgctgggccaaatagtatttctggatctagatccttgaggaattccacactgtctcctacaatggttgaactaatttacattgggggattacattccaacatgagatgtggaagggaacaaatatccaaactgtaccagtgggacatctggtcatgtcccctgcaggactggcccacaggggtggggaagagcaagaggggggagaaggttggtggcacttactgttgatgacacttatcacactacacatggtacctttcctttcggggtcctcatggggctgctcctgcttttccagggaggtcctggtccaattctcgagcatctcagtcagccaggtgtgttcaggctcaccgccttcatctacgtcaagaaatccaggtggtctcagacactgtccaagtaccctaccaagaacatcacagaccctgctctgcctcatcttctgcaatgccctgcggttcctcctgaggtgacctccttctccaggtgaccctctctccccttgccttctgctgacccccatgttacctcactctctctgactttctggcctcttttttctagctccttcatctctgcctccacctctactcatcttttgcacgcttattttcttcagggttggaggcaaagtctcccatttatttatttatttatttatttatttatttatttatttatttatttgagacagagtattgctctgttgcccaggctggagtgcaatggggcaatctcagctcactgcaacctctgcctcccagtttcaagaaattcccctggctcagcctctggagtatctgggactacaggcacgcaccaccaccaggcccggctaatttttgtatttttagtactgatggggttttaccatgttggccaggctggtctcgaactcctgacctcaagtgatccacccccctcagcctcccaaagtgctgggattacaggcattgagctatcatgcctggcatcccctcttatttttatccacactcatgaattagatgatgttcaactctctctctctcacacacacacactgataatagctctgctcacgtttgctgagaacgtcacctgccaggctcatcttggcattttgcataaattctacacttcaaccttcaccgcattccttggagtgagctctctgaggcttcttttataagggattaatccaaatcaagagggctccaccctcatggtctcaacacctcccaaaggccccatctcttaataccatcaccttggggttgccatttcttttttgttgttgttgttgttgagacaggttgtcgctctgtcaccaggctggagtgcagtggtacaatcaccagcctaccatcccacaacattagttagccatttgcaggttggagatagattctccttccagacttgtctataaccagcatatggtgaatgctgatgtcaaaaaacaacattaaagcccgccatgtggcaagaagttggctctctgcaacccagaagagggttccccagaatccaaccctactggtactctgatcttgggcttccagcctccagaactgagaaattaatctctgttgttgctaagccagccagcctatgtatggcactttgttctggcagccttcacaactaaaacagggagggaggcatgaagtggatgaagggctgtgctcaggacctaccttcactctgtacctgactgttgacctgtgaaaaagccacacttgcatcttccacaactggaaggaagaccatctttgtcagcctctgctgtagttaggttggggccatgtgactgatcctggccaacaggaggtgtgtggagctggtgcccaatacttccaggcctggctacaaaaggccttctgtggcactccagctctctcctctcatggaacagacaaggagaccttgtgccaagaggagaagcaacgagatgcaagcagcttggcccagcgcggtggctcacacctgtaatcccagcactttgggaggcccaggcaggcagatcacttgaggtcaggagttcgagagtagcctgggtaatgtagtgaaaactcgtctctactaaaaatacaaaaattagccaggtgtggtggcagttgcctgtaatcccagctattcaggagtctggggcaggagaatagcttgaacctggaaggcagaggttgcagtgagctgagattatgccactgcactctagcctgggtgacacggctagactctgtctccaaaaaaaaaaaagaaaaaagaaaaggaaaggaaaaaaaagacgcaaacagcttggatgcctaagtccccacatggagccaagttgccctggaggaacactcaacccatatcgctttttgggtaagcaaaatataaaccctttgtgtcttaagctatagcaatttgtggtttctttgcgcagcatagcctctcctgaacaaatatagtctcctccataatataatctaacttctccatacagaattcatctgatactttgttcttgttctccgtactcccaccatgggtcaagtctgattccttcatgactcccaacctatgtagttttgggaagtatttttcctctcaatttgctaattgcctcaggctgttcccattttctgcctctgacacttggatcctaggcatacctagggtatatctgacgactatgtacatggatcctatggttagactcatccaaaaagctcctaggtctaatgaatgaattcagtagagtttcaggatacaaaatcaatgtacacaaatcagtagcactgctatacaccaacaatgaccaagctgagattcaaatcaagaactcaaccccttttacaacagctgcaaaaaaataaaataaagtactcaggaatatacctaaccaaggaggtgaaagactgctacaaggaaaactacaaaacactgctgaaagaaatcatagatgacacaaacaaatggaaacacatcccatgctcatggatgggtagaatcaatattgtgaaaatgaccatactgccaaaagcaatctacaagtccagtgtaattcctatcaaaatactatcatttttcacagagtgtcagtttgaactccgatcctgcccctcctggctgcgtggcctcaggcacctgggagagtccatgctcctctccattcccaaaggagcaccacatgaatcagacacgtaaagtttttaggacaatggctggcttcaagccagtgtgcagtccacactatcattagggattcatggcaaagtaggatgcttaccttctgggggaggatgttccccttgtgaactttcttgcagcctcagtaatcgggctgcaaaagagcagaggcagggggaatgtttaactgtaaagtcactagttatagaaaatacagattacctgcagcgacgtctctttaatagaaatggcagccatgggttggagtctgttgatacgggttctggagagctaattttgtacccgtcttccaactctgtgctcgctgacctcatgttggtagcttgaaatttgccatgatgtgatcaagtgggtttcatactaggaatgcagggatggcttaacatatgcaagtcaacaaatgtgatatatcacagaaacagaattaaaaacaaaaatcataggagatgcagaagcatttcacaaaatcccacatccctttatgattaaagccctcaacaaaatcggtatacaagagacatacttcaatgtaataaaagccatctatgacaaacccacagccaacattacactgaacagggaaaagtttaaagcattccccctgagaactgcaataagacaagaatgcccactcttatcacttgtattcaacatagtactggaagtcctagccacagccatcagacaagagaaagaaatgaagggtatccaaaccagtaaagaggaagtcaaactgttagtgttcactgatgatatgattgtacacctagaaaaccctaaagactcatccaaaaagctcctaggtctgatgaatgaattcagtagagtttcaggatacaaaatcaatgtacacaaacagtagcactgctatacaccaacaatgaccaagctgagattcaaatcaagaactcaaccccttttacaacagctgcaaaaaaataaaataaaatactcaggaatatacctaaccaaggaggtgaaagactgctacaaggaaaactacaaaacactgctgaaagaaatcatagatgacacaaacaaatggaaacacatcccatgctcatggatgggtagaatcaatattgtgaaaatgaccatactgccaaaagcaatctacaagtccagtgtaattcccatcaaaatactatcatttttcacagaacaaaaaatcctaaaatccttttttttttttttttgagacttagtctcgctctgttgcccaggctggagtgcaatggccaattttggctcactgcaacctctgcttcccaagttcaagcgattctcctgtctcagcctcccaagtagctgggattacaggcgcatgcaccatgcctggctaatttttgtatttgtagtagagatggggtttcgccatgttggccaggctggtctcaaactcctgacctcaggtgatccacccgccttggcctcccaaagtgctgggattacagacgtgagctaccatgcccagccacaatcccaaaatccatatgaaccaaaaaagagccctcatagccaaagcaaagactaagcaaaaagaacaaatctggaggcatcacattacccaatcaaattatactacaagcctatagttaccaaaacagcacggtactggtataaaattaggcatgtagaacaatggaacagaatagagagcccagaaataaagccaaatacttatagccaagtgatcttcgacaaagcaaacaaaaacataaagtgggggaaaggacaccttattcaacaaatggtgctgggataactggcaagccacatgtaggagaatgaaactcgatccttatttctcaccttatacaaaaatcaactcacaaattcaatgtgaatttgcatcaaagacttaaatataagaccagaaaccataaaaattctagaagataacatcaaaaaaactcttctagatgttggcttaggcaacgagttcatgaccaagagcccaaaagcaaatgcaacaaaaacaaaaataaacatatggatatatgggaacgatggctcacgcctgtaatcctggcactctgggaggcccagctgggcggatcttcaggtcaggagttccagaccaacatgacgaaaccccatctctattaaaaatacaaaaattggccaggtatggtgttggatgcctgtaatcccagctactcaggaggctgaggcaggagaattgcttgagtctgggaggcggagattgcagtgagccgagatcgtgctgctgcactgaagcctgggtgatggagtgagactccgtctcaaaaataaacaaatatatgggacctgagtaaattaaaaagcttctgtacagcaaaggaagtaattatcagagtaaacacacaacccactgaatgcgagcaaatatttgcaaactaggcatccacaaaagacgattatacagaacctataaggaactcaaagaaatcagcaagaaaacgaataatcccaccgaaaagcatcccaatgatatgaatagacatttctcaaaagaagatattccagtggccaagaaacatatgaaaaaaatggtcagcatcactaatcattaaagaaacgcaaatgaaagccacaatgagataccatcttactcccacaagaatggccattgataaaaattcaaaaaaaaccatagacgttggtgtggatgcggtgcaaatggaacactcacacactgctggtgggaatgtaaattagtacaacctctatggaaaacagtatggagagtcctcagagaactaaaagtagatctaccgttcgatccagcaatcccactactgggtatctacccaaaggaaaggcagccattatatgaaaaagacacttgtgggctgggtgcagtggctcacgcctgtaatcccaacactttgggaggctgaggaggggagatcactcgaggtcaggcgttcaagaccagcctggccaacatggtgaaaccccatctctactaaaaatacaaaaattagctggatgcggtggtgcacatctgtagtcccagctacttgggaggctgaggcaggagaatcacttgaacccacgagttggaggttgcagtgagattgcaccactgcattccagcctgggcaacagagcgagactctgcctcaaaaaaaaaaaaaaaagacacatgcacatgtatgtttatagcagcacaattcacaattgaaagatatggaaccagccgagcatggtggctcatgcctgtaatcccagcactttgggaggctgaggcgggtggatcatgaggtcaggagatcgagactatcctggctaacaccggtctctactaaaaatacaaaaaaaaaaaaaaaaaaaaaattagctgggcgcagtggtgggtgcctgtagtcccagctactcaggaggctgggccaggagaatggcgtgaacctgggaggcggagcttgcggtgagccgagatcgcgccactgcactccagcttgggtgacagagtgagactgtctcaaaaaaaaaaaaagatatgaacccacctaagtgcccattgacaaatgagtggatacagaatatgtggtatataaacaccatggaatatgactcagccataaaaaagaataaaataatgtcttttgcagaaacttggatggaggccatcattctaagtaaagtaactcaggaatgtaaaaccaaaaaccatatgttctcacttataagtgggagctaagctatgggtacgcaaaggcatacagagtggcataacggacttcagagattcagaaagaggagggtagggaggtggggataaaaaactacacattggggccaggagtggtgggtcatgcctgtaatcccggcactttgggaggccgaggcaggtggatcacctgaggtcaggagttcgagaccagtctgagcaacatggagaaaccctgtctgtactaaaaaaatacaaaattagccaggcatggtggtgcatgcctgtaatcccagctactcgggaggttgaggcaggagaatggcttgaacccaggaggtggaggttgcggtgagcagagatcgctccattgcactccagcctgggcaacaagagtgaaattccgtctcaaaaaacaagaacaaaaacaaaaaaacactacacattggggccaggtgtggtggctcatgcctgtaatcccagcactttgggaggctgaggcgggcagattgcttgagctcagaagttcgagaccagcctgaccaacatggcaaaacctcatctctactaaaaatataaaaattagccgggcatggtggtacgtgcctgtaattccacctactagggaggctgaggcaggagaagcacttgaacccaggatacagaggttgcagtgagacgagatcttgctactgcactccagcctgggcaacagagtgagactgtcacaaaaaacaaaaccaaaaaactacatattgaatgcaacatactctaaaacatacactgatgggtggactacagtctcagaatttactactacataattcatcgtgtaacagaaaccacttgtaccccaaaagctattgaagtaaaaattcaaaaaaaaacaaaaaaatcttaatatttaaaaatattattacctaatagtagcagtgttgatccttataattaaaatattgtacatgttataactttttacttgagaccaaatcaaaattcaatttttccacatgtgctgaaaatgcgatagaaagctaagtcctgatacacgtcggttaggtcaagcttctgcttcatctttttcaaatttttgaattgtcaataaataaattttgtctgcttttttttctttttctttctttctttcttttttttttttttttttttgagacacagtctcgatctgttgcccagcctggagtatagtggtgcgatctcggctcactgcaacccctgcctcccgggttcgagcaattcccctgcttcagcctcccgagtagctggggttacaggcgcccgccaccatgcccagttaatttttatatttttagtagaaacgaggtttcaccatgt[222 bp omitted]tgcctcagcctcccgagtagctgggactacaggcgcccgccactacgcccggctaattttttgtattttttagtagagacggagtttcaccatgttagc[133 bp omitted]tattgacatttaagaggacactcccatgtgtcaagctttgctctaagtactttacatacatgaggtcatttaaaccccacatcaaatagtacatagtcccaatcttgtatatttgatgtatatttacatttatttgatataaatatacaagattggggctatgcactattgtatccattttacaaaggagaaattgggtcacagagaattttgttgttgttgttgattttcttttctttttttttttttttttgtttgtttcatttcttttttttctttttctttttcttttttctttttttttttttgagactgtgtttcactcttgttgcccaggctggagtgcaatggtgtgatctcagctcactgcaacctccacctcctgggttcaagcgattctcctgcctcagcttcccgtgtagctgggattacaggcatgtaccaccacgcccggctaattttgtatttttagtagagatggggtttctccacgttggtcaggctggtctcaaactcctgacctcaggtgatctgcccacctcagcctcccaaagtgctgagattacaggtgtgagccactgcgcccggcccctcatttctttattttttaatttttttcacagagaatttaagcagctttctagggtcactaacgcatgagaggtggagctgggatgtggattcaggcagacaggctttggatcagaaccaccatacgattcccctatagatccctgtgtctgcactcaccaaccagttacataggtgagtcacgcatcctttccatgacccggtggctctcagcaaaatggaggggacaacagcatccacttcttcaggtcattcaaagggttaaatgatgaacaggtaacgaatgccaattttgtgtgtgtgtgtgtgtgtgtgtgtgtgtgtgtgtgtgtgatggagtcttgctctgttgcccagactggactgtagtggtgtgatcttagctcactgcagcctttgcctcctggtttcaagcgattcttgtgcctcaacctcctgagtagctgggatcacaggcgtgcaccaccatacttggctaatttttgtatttttagtagagacgcattttcaccatgttacccagcttgcactcgaacccctgacctcaagtgatctgtccgcctgggcctcccaaagtgctgggattacaggcatgagccactgcgccgggccaggctgcttgcatcttgttgcccaggctggagtgcaatggtgtgatctcagctcactgcaacctccgcctcctgggtttaagagcttctcctcttggcacaaggtctccttgtctgttccatgagaggagagagctggagagccacagaaggccttttgtagccaggcctggaagtagcaggcaccagctccacacacctgttggccaggatcagaaacctgaactcctggcctcaaatgatccgcccgccttagcctcccaagtgttgcgattacgggtgtcagccactgcatccagccagattgctaatgtttactgagtgcctttatctaccagacactgtcctatgtgcttttgatgaattaactcatttaatcctcataactactattattatcacccacatggcacagaggcagaaactgaggcacagagaggttaggtaacttttcagaggtcacaaagctcacatgtaccacagcaacattccttccaagggtgtctgtactctcatccactctgtggtcttcctggctgcccataatcaatgttcagtgtatgagaataaatgtcaggaaatgtggttgttagaaccattatacacaggcctcttttctgccacatgcaggaaaagtactgtgaatctccttgcataaaatatctctaggctttgacctttctgttccccaaatactcaccaaaaataaggtgtccaatgcttttagcattagcaacagcccttctccataaacctgccaagaaaatagcaataaaattcaaacattctccatcacatgactgtcatgtttgatattcaaagcaccagcagactggcataaagcactgcagggatctgcagcaggaagaaagatcattcttccattccataaatatttatgaagcaatcagtgggcacccggcactcttctgactgttggaatagagcagtaaacaagacagatttgtcctcaggaaccttctatgggtggagccagccgggcactgtagactggctaccccaaggccatttcaagctcccttccatgccaacgtttctcagcccacaggcaggaagggcaaatatttcccagcctcccttgcagctagagggaggtcaagctctggcccatgcagatttatgggggcacttctggaaagtcctagctgtcctactatgaaagagcaggacagcaaacatgttggattagaggcattgctggcatacccctcccacttggaaggacaaaacactgtgtagagattcacactgtgaacttttttttcaagaagtgattcaggaattagacaggaaatctgaaggaatccacagtccctttgaaggaagtgacgggctgcagcctatactgtgactcaagtgaagggctgcgagtccccagggtgtgagatggggaaagactgtttgcaggacacacgcccccaccacaccagggagcctgaaagtccagtctctggggtaaggccttaaccctattcagtgcaggatatgacttggggaggttcgtggaatataagtaggagctgtgggaagaaccctgcatgcactcccagatcccagtatggacccagggaagccattccttattgttcctcacagggcaccctgcagtggtcagccaaaaagttcaggtgggtggtcgcaggttgaaagaagcccccagctgggtttcatgagataactgtgggtggaggtgaacttctccacccacatggggtgaatgaaaagcaagctgcagacacgtgtgcaggaccctggcacatggctaggtgggatagatggggaggggcatggcctgagagcagtggttgctatctctgcagggaaagcttatgacttgggggcatttgcaagttctgagcacaggctgcctggaacttagctcaccactgccagtggaacagggtgggaggggatctgcctcgccaagtgtgtgggatccgcgtggggcttactgccacctgccactccccactccctacacaaactcttctgtgcagcagaggcagaaacattcctctctggattatcagcacatgggtctgaaaaccacccccaccccctgatacccacaggagctgctgcttgccctgcacagggagagttagagcacaaaactgcctgacccagcccacacctggctttgccctgccacccgccctggtggctttaatacaaaggacggaaacttttgggaactctgtggctctgcccattgcctgagaaacaagagtagccaccctgggcaacatagggcaagtgaatatcccactgctactactgcagctggtgctccacctgctgggtggaggccaaccaacacagtccatgacagcatctcctggtaggataacactgggcccaggaaggagaaaatggctctatgtcctcagctatcaccactgcatgcaccactctggctaaccaggaggtcctgagtctgtccacatgatcagttcattactactataactagcattcaaggaagccaacctactaaggctgtccatcagcaaggaatctcacagagcctgtgtctctctcctgccacccccattagagctggtgctgcttcccattgctgggagtctcgaggacaggggacattaccggattccttggagacattcccaagaaccagcctgaagtgtggcagcttcactgggtggctagacccagaggaacaataacactcactgtagtctggtgctcagtgactcctatcctaggggaatggggagtgcaccacatcaagggaacaccccatgggacaaaagaatctggacagcaggacttgaaaatcagatctttctgctggtgggaagtttctttcagcagggacacagtttcagtgctgggctcagcacggaaagcccacagctctaacccaaccatcagacagccctggtgtgcatgaagggtcttggataaggggatgtctttcccctctcttccactgccacaggcacagttggggtttctcccatgggagctcagcatgggtacaactatagacagcctttctggaacatatcagggcgactgcatccccacaggaggagcccctctaggtttaggcttgcataagagacagattcacagttcctctctactcagaacaccaacattcctacagatgaaaagaggtgcccgtctgatctgaatagctggagcactggatcacgagtgtgtctgagagatggatggctttctggctgacctggcaggggagctgaggtggctccaacccttctgcctgataagaccacggtgcacagccaggcatggtggctcacggctgtaatcccagcactttgggaggccgaggtgggcggatcacctgaggttgggagatcgagaccagcctgaccaacacggagaaaccccatctctactaaaaatacaaaattagctgggcatggtggcaagtgcctgcaatcccagctactcaggaggctgcggcaggagaattccttgaacctgggaggcggaggttgtggggtgagctgagatcatgccattgtattccagcctgggcaacaagagccaaactctgtctcaaaaaaaaaaaaaaaaaatctcgatgcaactcactgagagctcctccagccacctctgtcaaggctgggacctttgctcaccattgggtgttgcatttactcacatgttttggccacaatcacttcctatgcactcccctacagacctgaagcctgaaccatcaaaccagtcaataaaatactggggaaaaaattgcatgccttgtggggaatgagttaagcttcaagagtcttctaccattccagccctgtaggcaacagtgaacttgctcacacagtgagcacatcgcttctacaaccagcatatgagaaagccatcacacgaagactccctatatccaaggaactcttacaatcttcacccctgaaagcaccaaggaccaaattaggctataattagctagggacattaaagtcacatccttaagcggaaaaaagaaaaaaaaaacacagtcaaatccaacataaattcaagaataattaaaagaaatagtctactcaaatgagaaggaatcagaaaagtaactttggtaatatgacaaaacatggttctacagcacccccaaaagatcacactacctctccagcaacagatccaaatcaagatgaaatctttgaaataccagataaagaattcaaatgggcaccaaatgaatcatacatgtaatgttcctaggacaatggctggcctcaagcaagtgtgcggtccccattatcatcagggattcatgatgaagtaggatgcttacctttcagggtcagattccttaactggtctgcaaaagagtagaagcaggaggaatgtttatctgtacaacaaagtccctagttataatataaaaaatacagatgacctgcagggatatttcattaatagaaatggcagccatgggctccaatggcagccaatggctctcgagagccaattttgcacctctcttccaactctgtgctcagtgacctcatgttggtagcctgaagttggccacggtgggaacatttacaccacaggaattggcaaacactacatatcaggaattttgtttttgttttttagagagaaagcttagcagacccactggagaagtaacactcagacccatctcacacctttagttagccatttggaggttggatatagatagattccctttttagttttgtttttaaccaagctatggtgaacaccaatgtcaaagaacaacatcagcccgggcgtggtggtttatgcctgtaatcctagcacactgggaggctgaggcagtgaatcacttgaggtcaggagttcaagaccagcctggccaacatggtgaaatcctgtctctaccaaaaatacaaaaattagccaggcacggtggtgcgcgcctgtagtcccagttactcgggaggagagttgcttaagcctgggaggtggaggttgcagtgaactgagatcataccactgcactccagcctgggcaacagagcaaaactctgtctcaaaaaaacaaacaacaaaaaaagtcaaagtgtaagaactaggacagtgcctggcacacaggaggtcccatgaatatacattaaatgaatgacgagtggtttagggtgtgaactcagtaatgatcctaaaaataagattaacatgtaatgaaacactcccatgtgtcaggcttggctctaagcattttacatacatgaggtcatttaaaccccacatcaaatatacgagactgcgactacgtactattgtctccattttaggaaggggaaattgggtcacagagaatttaagcagctttccagagtgagcagtgcaggagaagcagagccgggatgtggatccaggcagacaggctttggatcagaaccaccacactattcccctagagatccaccacccagttctcctatagatccccgcgtctgcactcactgaccagcagtgtgggtgagtcacgcatccttcccacgacttggtggatctcagcaaaatggaagggacaaaagcgtctgcctcttagggtattaaaggggttaaatgttaaatgagggaccaggtaatgattgctaatgtttactgagtgccgttatctaccaggcactgtcctacaagctttcaatgaattaactcatcaaatattcataactactgttattatcacccgcatggcacagaggcagaaaccgaggcacagagaggttaagtaacttttcggaggtcacaaagcttacatgtaccagagcaacattccttccaagggagtctgtactctcatccactctgtggtcatcctggctgcccaattatatgagaataaatgtcaggaaaagcagttgctagaacaattacacacaggtctctcttctgccatgagtaggaaaagtactgtgaatctccttgcataaaatatctctagggtttgacctttctgttccccaaatactcaccaaaaatgtattccctaatgacttcagtgttaccaagagcacttccccataaacctgccaagaaaagagcaataaaattcaaacattctccatcacgtgactgtcatgtttgatattcaaagcaccagcagactggcataaagcactgcagggatctgcagcaggaagaaagatctttcttccattccataaatatttatgaagcaattagtgggcacccggcactcttctggctgttggaatagagcagtaaacaagacagataaagtccttgtcctcacgaaccttctatgggtggagccagccgggcactgtagactggctaccccaaggccatttcaagctcctgtccatgccaacccttctcagcacacaggcaggaagggcaaatatttcccagcctcccttgcagctaggggacggtcaagctctggtccatgcacactgctggggggacttctgcaaagtgcttgttctccttctcagaaggagcaggccaggtatggtggcatgcaactctagtctcagctacttgggaggctgaggcaggaagatcacttgaggccaggagttcaagacctgtattgggctatgactgtgcttttgcacggcagcttgagtgacagagagagaccctgacttcaaaaaaaaaaaaaaaagttgcagcttcattggatgcagccgccatcccgtggtgtggaggagttcagcatgagggtgacttaatatgctaaggatggaggagcagaaaatctagaataaacctgggtccttctgcttaatgttgcacagctaaaccaatgtcaccagccacctaactttgtattatttatttattttgagatgggatctcgctctgttgcccaggctggagtgcagtggtgtgatctcggctcactgcaacctctgcctcccagattcaagtgattctcctgcttcagcctcccgactagctgggattacaggcatgcaccaccacgccctgctaatttttgtattttttaagtagagacggggtttcaccatgttggcccgtctggtcttgaactcttgacctcaagtgatctgcccgcctcggcctcccacagtgctgggatttcagctgtgagtcacggtgctcagtctgtctttttcttttgtaagaaaattaatcccacatgtcctcggggcactgtggttggttagtgacttttagccaaacacatttgtatatgatacagggagacataaaaaatgaataatcagccaggcacggtggctcacgcctgtaatgctaacactttgggagactgaggtgggcggatcaattgaagtcaggagtttaaagtcagcctggctaacatggtgaaaccctatctctactaaaaaatacaaaaattagccaggcctggtggtatgcacctatagtcccagctacttgggaggctgaggcaggggaataacttgaacctgggaggttgcagtgagcagagatcacacaactgcactccagcctgggagacagagtgagactccatctcaaaaaaaaaaaaaaaaaaaaaaaaaatagacacacccattaggatggctggtatccaaaaaaccccagaaaacaataagtgttgatgaggacgtggagaaattggaaacctgggacaccattgggcagaatataaaatggtacagccactgtggaaaatggtatggtcgttcctcaaaaaaaaaattttttttttttttgagatagcccaggctggagcgcaatggcgcgatctccgctcactgcagcttccgcctctcgagatcaagagattctcctgcctcagcctcctgagtaactggaattacaggcatgcaccaccatgcccggctaattttgtattttttgtaga[144 bp omitted]catgatccagcaattctacctctgagtatatacccaaaagaattgaaagcagggtctcaaagagatattcatagacccatgtgcatggcaggttccttcacaacagccaaaaggtgaaagcaatccatgtgtccatcgatggatgaattgataagcaaaatgtggtatattcgtacaatggaatatgattcagccataaaaagaaaggaaattcagacacatggtacaacatggatgaacttcgaagtcattttcctcagtgaaatcagacagacacaaaaagacaagcactgcatgattccatttacatgtcatactcagagtagtcaaaatcgtagaggcagaaggtagcattgtggttgtcaggggctaagggagggggtgacagggacttagtattcaatgggcgtagagttccagttttacaagatgaaaagtgttatggagatggatggcagtgatggttgcacaacattatgaatgtattgtatttataccactgtacttgacactttaaaatggttaaaatggcaaattttatgttatgtttattttataataataaataaaaagcaccctggtgtgtgaggggagggataaaatacacgtacagaatcccttcagtaggtgatacatacatctaaggaaataataatgttatagggagtacctgggagtgacaatttcaaaatctctgatgcccaagaccagatttagcaaagagatggtggggataggagacaggagccaggcttggcaatgtgaaggaccccgtctgtccagaccagagaaaaggggaagatccccttcatcctaccttgttctcctcccctgagaacacccctccatctaccaggttgcagaagctggaacctttgatgtcatctctgattctccttactctccacatccaatccaggtgtaattcttcttcatccatctccaggtttccagagtccatccacttccctcccatatccattctggtacccaaccttaaactgccattatctgtcaccaggaccattagcttctcaactgctcccaacttctaagtttacacacccacccctaatccatgctcagagagagagagagagagtgagatgttttaccatataaactgaatcggtcaccaccctaattaaactgcctccctggctctcctatcgcacttggaatccaaactaaacttcatctgtgtccttcagggtcccatatgatctggaccctgcctacctctctagccctctctctcagcctcattcaggaggctccagcctcactggtcttctcattggttctagagtaagacaaacttggtcctggcttagggtctgatatggttaagctttatgtccccacccaaatctctcgagttgtaatccccagatgttgagggagagacctggtgggaggtaatcagatcatgggggcagatccccccatgctgtactcgtgatagcgagtgagttctcacgagatctgatggtttgataagtgttgggcagctcttctttggcttgctcttctctctcctgctaccacttgaagaaggttctttcttccctttcaccttctgccatgattgtaagtttcctgaggcctccccagccatgtgaaactgtgagtcaattaaacctcctttgtctacaaattacccagtctcgggtagtatctttatagtagtatgaaaacggactaatacagggtctctgcatttgctcttccctctgtccatgatgcttttcctctaagatatctgcatggcttcacttttcatcaggtccatgctcaaaggccatctcctgtcagaagctctgaccaccaattaaaaataatactgtagtcactctccagtcccttaccatgaattatttttcaagatagcatttactatgatctgacattataatacatacttatttttgtgtgtgttcattcatcatctccttccctggagtgcaaacttcattagggaatgagccttcactgtcctgctcatgactgaatcccctgcatttaaaatagtatcaggctcctagtgtgtctcaaaagtgtatgctaaaatcatggagagtcaaccatccttaatttcctaccatgtgctggacactgggctgagtgttttatttgtggatcatacctaactctcacacccacattttgaggtaagtactttccctatgagaaaaacgaggctcaggtaacattaatgactttctcaagctggcatggttggtcctatgtaggggagctgtctgcccagcagggtaatgccttcagaccctgaatgctgagaagattatgaagccacaactaaaagtgataccagtgtgtaagctacagtcaaggacatttaatcaagttctgattttactcactatgactgttttgtttttggtttttgttgtaattttttctggaaataccccatttaaaaaaaattgtatgccccttgctttgctggtgcccaaaacacattctagttttttgtttgtttgtttgtttgtttgtttgttttgagacaagatctttctctgtcatccaggctggagtgcagtggggcgatcataactcactgcagccttgaactcccatgctgaagtgatccttccactgcctcagcctcctgagtagctgggaccacaggcacatgccacaatgcctggctaatttttaaatcttgtgtagagacacagtgttgctatgttgccgaggttggtctcaaactcccagtctcaagggatcctcccaggtcagcctcccaaagcaccatgtaatcccaaacacattctgaatctgcttattggaagccacagccctggacttgagcccctctattaagctccctctcctggattgtttgataggatatcaggtatctgccgcattaaggagacctttgagagacactgaagactcagcagaaggaatacaccattcctctttctggaagcctaccaagtccttttctttcccccaagaaatttaagagctgggcaaactagaccctcagaaggaaaattcttgcctctcctccacttcccacccccttttaatcccctctgaccccagcgctgacctctcaggaaagtcaggtctctctcagggtgagttctgaccagtcttcccttcttgaatttgcttccgaagtgggttatggaaacaaaggcccccagtgcagagaagccagcgtggtgaggggtgaactcgaaccaggtctctgcagaggaaatacaacggcaagtgagtcccagcacagaaccaggaatgtagcaggtatgcaggaaaaagaaatctattaatgaggaattacaaccatgacaggagaatgttagagatggactgtgtggtatcagaaaccactggggatctcatcctcagacctgagtctacgctgctggtggcagctcataacttccacagcagcctgtttccaatattttccagagcttgaaccctcagccctgcctctctcttccatctcattgtggctgcaactccatggaatcctggagtgcaagggaagagtgtagccacacgattgcatggaggattgtctgtgggcataaatctaatgcatgattccaatgtgagtcattagaatattccagggaagaaaatgacatgatcagattttcatcctggaaacttccatcaggtagccagggaaggaggtggacagcttgggatgggcgggccagtgaggaactaattacaagagtctcccaggagactgggagacctggtctggggatgatgtagaagagcacaaaggatgaaaatgaggagggggtgatttctaggtctgggaatgactgaatttgtggggcttatggaaaggacggagtcagctgtatctgctctggtgagaaaacagcacaaggatccacaccgaggagagagataaaacattcatggccgggcgtggtggctcacgtctgtaatcccagcactttgggaggcggaggtgagtggatcacctaaggtcaggagttcgagaccagcctgattaacatggtgacaccccatccctactaaaaatacaaaaattagccaggcgtggtggtgcatgcctataatcccagctacttgggaggctgaggcaggagaatcacttgaacctgggaggcagaggttgcagtgagccgagatcgtgccattacactccagcctgggcaacaagagcaaaactctgtctcaaacaaacaaacagacaaacaccattcacactgggggcttctgagccttgagatgccaggagacgcccaaccacaggtaactggtaacattgcctgatgtatcgtgagaacttaccaggacacagttgctgaacaagtgagtgcattttatgcttaggaaatagggtaaggaggtctggatctcaggagagagatgagctcaaaagagaaactggaatgtctggagagctgccagcatttgggtgataatcggacctatg[144 bp omitted]tctactaaaaatacaaaattcgctgggcgtgatggcgcatgcctgtaatcccagctactcgggaggctggggcaggagaatcgcttgaacctgggaggcggaggttgtggtgagccgagatcgtgccattgcactctaacctgggcaacaagagagaaactccgtctcaaaaaaaaaaaaaaaagtgagagacagccccacccacccaccccgccatccttcaaacatcccttattacagttttctttacttttttcttttttctttttttttttttttttttgagacggagtcttgctctgtcgcccaggctggagtgctgtggcgcgatctcagctcactgcaacctccgcctcccgggttcacgccattctcctgcctc[197 bp omitted]tccctcctctcctctgttttcttttttctttcttctttttggggggacagggtctcactttgtcactcaggctgtagtacaatggtgcaatcacagctcaccgaagccttgaattcctgggctccagtgatcctcctgccccagtctcctgggtagattcttcaggttcctgccaccatgcttggctaatttattgtgtttttttgttttgttttgttttttaatgttgttgttttgagatgggatctcactatgttgcccagggtggtctccaacttctggtttcaggcgatcctcccacctcagcctcccaaaccactgggattacaagcgtgagccaccatgttggcctcttaaaggttttcttgatccatgcaaagcaagtgcatgtcctctggtcacttctgggacttccctcttctctcgtctaagctgagcaccctgttttctgcaatcctgagcccttccctcttcctgggctccccaaggggagggcagggaaacattcttccattccactccgtgctgttccatcccttactacctctccctccctctaaatgtttgcttacctggtgctcttgcctcctgccaggaaggttgcaggtcattgtcaatggctgcaaatattgggtagggtagtgtcccttcttccacgggcttcttcatattggacaaatgagactccggcagctttgggagaaggtgccaagacagtgtgagggaggcatgtgggtcccacagggtggaacctctgcacgtaggccacatttttttttagaggggtctcagtctgtcacccaggctggagtgcagtggtacaataatgggccactacagcctcaacctcctgggctcaagcaatccacccacctcaacctcccaagtagctgggactacagatgcatgtcaccatgcccggctaatttattttttgatagagacaggcttttgctatgttgcccaggctggtctcgaactcatggcttcaagcaatcctcccgcctcagccacccaaagtgcttggataggctaggtgctgtggctcatacccataatcccagcactttgggaggctgaggtggaaggatcacttgagcccaggatttggagaccaccccgagcaaaaaagcgaaaccctatctctaaaaaaaaaaaaaaaaaaaaaaaaaaaaaaaaaaaaaaatttgtcaggcccagtggtgcgtgcctgtagtcccagctacttgggaggctgagctgagaggattgcttgagcccaggaggtcaaggctgcagtgagctgtgattgcaccactgcactccagcctggacgacagagtgaaaccctgtctcaagaataaacaaaacaaacaaaaaacaacaaaaacccgatgtgttaggataggctggatgcagtggctcatacacgtaatcccagcacttcgggaggctgagataggaggatcacttgaacccagtagttggaggattgcttgagctcaggagtttgagaccagcctgggcaatatagcaagatccctgtctctacaaaaaaaaaaataattaaaaattagccaggcacgatggtgcatgcctgttgccccagcttactcaaaaggctgaggcaagaggattgcttgagcccaggaggtcgaagctgcagtgagccatgatctcgccactgcactccagcctgggtgacagagcaagaccctgtctcaaaaataaaatgaaataaaataaaatagtgaattcaagacatcaaatggccaagcagagatggagaggaaagttgtcttgggtctgacactttccctatttctgccttattccatcataagtcctcattgttcttcttgccctggatgtctgtgtatctttctagtaaatcatatcactttatttgttgcataaacgaatcagagtcaatttctgtcacttgcaaccacagtaatcctgatatactttagttttgaggcatcaaccgaagtgcccagattttgatgacttgaaaatcctgaaggacttaaaaggtggtgctggtcagcatctttggtaaccccacaccctgagaccccttgctcctacccccaccccaggtccccagctgggaatgacttacttctctggtttgcttagagataaccatgtaggcccagaagtcggtcagagagtaattctcagacctcgctgcttggatggttttctgtaggctcttagccaagtcccactcctgtcgggtaaatcgatgtttcaggtcagcctcgagagcttccatgtcaccatcattggtgtagagagaagatattgccctggaggacagaggaagagagtgagttgggcattttaagtgtggacgatgaagactggggaaagatgtgtgcaaggaggtccttcacaggaacacctgcctcatggagagggcgacacacagaggaaacggaaaatttccattaaataaatacaactgcagaacgatcaagttcgaaggaggactcaaaatcatctgggacaatccttccatttcacaggcaggaaaatgagagcacgatgggagaaaggcctcatcagagtcaaatgttttttgcagccagcacttattaaaaggtttatatgtgacagcaacaaactgtctttagtcttttatacctattaactcacataatcctagaaaatcaatgaacggggccaggtgtggtggttcatgcatgtaatcccagcactttgggaggacgaggcgggaggattgcctgaggtcaggagttcgagaccagcctggccaacatggtgaaaccccgtctccactaaaaatacagaaaaattagccaggcgtggtggcatgcgtggtggtgggtacctctagtgccggatactcaggaaaccctgtctctactaaaaacacaaaaattagccaggcatggtggcacacgcctgtggtcccagctgctcaggaggctgaagca[298 bp omitted]aggctgaggcaggagaatggcgtgaacccgggaggctgagcttgcagtgagccgagatcgcgccactgcactccagcctgggcaacagagcaagactctatctcaaaaagaaaaaaaaaaagaaaaaaaagactttatattcatttgttcactcaataaatatatattatatatattaatttataaagaaaagaggtttatttagctcacagttctgcaggctgtacaagaagcatggtgcaaaaagcttctactcatggcagaaggcaagggagctggtgtgtcacatagagtctatatatatatatatatatatatttttttttttttttttgagacaggtcttgctctgttgcccagactagagtgcagtggcatgatcttggctcactgcagtctcaaacccccaggctcaaatgatcctcccacctcagcctcccaagtagctgggaccactacccaccaggtgcatcaccatgccctgctcatttttaaatttattttctgtagagatggagtctcactatgttgcccacgctggtctcaaacttgtggcctgaagcaatcctcccacctcagcttcccaaaatgctgggattataggtgtgagccaccgtgcccgggctcaataaaaatttttgatgttcttaatgctgcttatcgggtgctatctaccctcacaccatccaatgtattaaacatacatcatagctcttgagcccctgaagtgtggctagcatgatttaaaatatttatttcattttaattagcttaaatttaaacactggtactccattcagttattgggaaactctgaagtatgtttggaacaagctgggtatgaaaagttctttcctttaatatctttttttttttttttttgagatggagtttcactcttgtcacccaggctgaagtacagtggttcgagctcggctcactgcaacctctgcctcccggattcaagtgattctccttcctcagcctcccaagtagctgggattacaggtgcgtgccaccacacccagctaatttttgtatttttagtagagacagggtttcaccgtgttggccaggctggtctcaaactcctgacctcaggtgatccacctgcctcggcctcttgaagtgctgggattacaggtgtgagccactgccccgggcctcctttaacatctaatgagacttctgcatccaacttggaatgcgctcagtataaaacgcccagcagctttcaaagacctagtctgacaaaaggaatgtcaaatatctcattaacaatttttttcttaacgatgtgtcaaaatgctaatgttttggatatattgggttaaagaaaatggatcatttcactgtttctttttaccttcttgaagaggctactagaaaatttaaaatgggccggacatggtggcttacacctgtaattccagcactttgggaagccagggcaggcagatcacctgaggtcagaagtttgagaccagcctggccaacacggggaaactccgtctctactaaaaatacaaaaattagctgggcatggtggcacgcgtctgtaatcccagctaactgggaggc[133 bp omitted]aaaatttaaaatgatagaatagatgtggctcatgttacatagctctacttgatagctcaggttgggacgatttgcatgtgtttcatcatttaattctcaaacagccctgtgagatcagcacagtttgttgctgtcacatgtaaacctttaataaatgctggctgcaaaaaacatttgactctgatgaggcctttctcccatcgtgctctcattttcctgcctgtgaaatggaaggactgtcccagatgattttgagtgctcctttgaacttgaccgttctgcagttatatttatttcatgtaaattttccatttcctctgtgtgtcgccctctccatgaggcaggcgttcctgtgaaggacctcctcacacacatcctttcccagtcttcatcgtccacacttacaatgctcaacagcggaggaaaccaaggcacaaagaagtatgtctgggctcgtaacagcccacaaaggacagctccaggaactaacccaaagctgttgaaatataaggctttcgttgttgttgtttgtagagatggggtcttgctatgttgcccaggctggtcttgaactcctgggctcaagagatcctcccacctcgacctcccaaagtactgggattacaggtgtgagtccctgtgtccagccaggcctgcctttttaaccacagcagtctcggaaagattccagaagaaatcatggggttcctatctcaatagcgccccctggagttctgcaatgtgcagtacagctaaacccccacgccatgtcactcaacatgttagatgagccttggaggaatagaggggtccggtgtgactctgcaggacctttcccactcccaagctctgcagctctgctcttcatgctgtcgcctccaggaacctcatcctccacatccagctcagaacccagctccagatcaaactttgagcacagaaatgaaaacaaatcaggccagccaggctcaacattcatgcctctgccctgcctatctcacactcgagcctctgctgctctgcctagccttacctcctgctctgaaaatgtgccaagatcgattagtcatgtctgccctgggcttggcaacaaacatgcagacatgagtgtttcatacctgccatctggggcctcctgaatgagacagtcctacacggattaatgcaatactttatcatagaggctgataagttaaaagggctgtattctatccacctgcagtgtgaaaagtgcacctgaacatgtaaatcctcctttaatgtcagaaggtagtattattatgctttgtccatggctttgtgtagcaaagaaagatacttggtgttttcccctgcttcctggtgcagagttcctaaaacccttggaattttcttttttagaaaaaaaaaattttttttttgagacagggtctctctgtcacccaggctggtgtgcagtggtgtgattgtagctcaatgcagcctcagcctcccaggctaaagcaatcctcctgcctcaacttcctgagtagctgggaccataggcatgcaccaccacgcctggctaattttttcactttttgtagagatggggtcttgctatgttgccccgcctgggtctcaaactcctagactcaagcgatcttcctgcctcagcctcccaaagttctgggattacaggcgtgagccaccacacctggcccatcttttgtaatacaccagcaattgtaagtaaagtgtgttcctgagttctgtgagctattccagtaaattattgaacatgaggcggaagctgtgggaaaccccaaactattgccagtcggtcagaagcaccagcggctaggtaattgcaactcgtgtctgaagtgggagcagttttttgggactgagcccctttcacctgtggaatctgatgtgaactccaggtagccagcgtcagaattgctcagaattgtaggacacccagctagtaccagagagctcgagaagcagcgttggaaaaaaccacacacatttggtgtcaggaggaaaaaaataatcccatttatgtgtcagaaagcaatctgaaacatgagtgatgcttaccaagtggatccagagacccctgcgaggtacgtgacggcatccaacaggccctgttctttcatctcactcaggaccccaaggcaggcaatgtgagcccgcagtcctccgcctgagcccagcacagcaacaactggggcctaggcattggggagaaaatcgatcagaggtttagagcctgaggatggaggtgggaacaagaagaagggtacctggggccgggcaccgtggctcacgcctgtaatcccagcacattgggaggccgaggcaggtggatcacttgaggtcaggagttcaagaccaacctggtcaatgtggtaaaaccccatctctactaaaaatacaaaaattagctgggtgtggtggcacacacctgtaatcccagctgctcagcaggctgatgcaggggaatagcttgaacctgggaggtggaggttgcagtgagccaagatcatgccactgcattccagcctgggtgacagagcgagacgttgtctcaaaaaaaaaaaaaaaaaaaaaagaaagaaaagaaaagaaaaagaaaggaggaggaggagaaggaggagacctaggatctcccttaggcaggggcaatgcctgtcccatagaagttcatatccttctatttctatcccatagaagttcatatccttcggtccagctctccctggctgagttgggccctggacactgggcacagagggggcgattctgggatctctggggccaccctcctcccctcacttacctcatcagcctcaatccttagcttcttcagagctttcagcacatgaagtcttcgtctctccacggccgccttttcttctttctggagcccaggaattatggaaacttcagagcttcccaggagaaaacacaaagaagtccagaaaattcacagggaaaagggataaaacacagaatttgacctagaactgggctgtccaagcaggtagccaccagcccacgggtacatggtttccttttggggtgaggaaaatattctgaaactagatagaggtgatggttgtacaacactgtgaatgcattgaatgccagtcaattattcacttttcaaaatggttaattttggggccagacgcggtggctcacacctgtaatcccagcactttgggagggtgaggtgggtggatcacttgagcccaggagttcaagaccagcctggccaacatggtgacatacctccctccctccctccctccctccccttccctcccctccctccctccctcccttccttccatccttccttccttcctccttccttccttccctccttctttccctccctccctccctccctccctccctccctccctccctccctccctccctccctcccttctttctttctttctttctttctttctttctttctttctttctttctctttctctctctcttttttgagacagagtctcgctctgttgcccaggctggagtgcagtggcgcaatctcagttcactgcaacctccacctccccggttcaacaataagacagggtcttgctctgttgcccaccaccagtgcggtggtgcaatcatagcttactgcagccttgaacaccgggactcaagtgatcctcatgtctcagcctcctaagtagcttggactacaggtgtgtaccactatgcttggctaatttttaaaaatattttcttttattgtagagatagggtttcaccatgttgcccaggctagtctcgaactctggggctcaagagatcttcttgcctcggccaccaaaagtgctggggttacaggcatgggccaccatgcccaaccttcagctctttccatctatctccaccaagcgagaggaactgtcacagccctcacctcttgacactcactatgcattccattacacaaatgctctgcttccccatagtggtcagctctaagaggacttaccttcccatggtgcactgcggtcagaaaattctcagtcctcctgccaaagaaatggctcttcttagtcctgtgcccactgttgggcttagcaaagacagtgggggagggctgggactgtcacgggctcatgggttctccttgtccactgcccagacaaaaccaatgcgaacagcaggtgttgcagcaaagagagagagtttaataatctcaggggcggccaagcgaggagaatgggagaaatatttcaagcgcgtctctctgaaaatttggaggctagggtttttcctcgctctttctctttctctgcctctgtctctgtctctgtctgtctctctctctttagatgaagtttccctcttgttgaccaggctggagtgcattggcatgatctcggctcactgcatcctccgcctcccgggttcaagcgattctcctgcctcagcctcctgagtatctgggattacaggcatgcaccaccatgcccggctaatttttgtatttttagtagagatggggtttctccatgttggccaggctgggcttgaactcccgacctcaggtgatccacccgccttggcctcccaaagtgctgggattacaggcacgagccaccgcgtccgacctgagactagggttttttaaggaaactttggtgggcaaggggctgagggaacaattgatcggctatggatgaaatcacaggtgtgtccaaaactatctttgtatagctgagtcagttcctgggagcgggtctcaggaccaggtggtagctcttggtctgccaaaatgctcactctgaaaactatctcaaagacaatttctttt[133 bp omitted]tgtcatgcccgaatagggccactagagggccccttggtcttggggtaacgccagcgtctgggaagatgcccattgcctagcggaccttggtctagcggttgcgtcagtgcctagagaccaggaaagggagtctccctttccccgggggagttagggaagactctgctccaccgcctcctgtggagggcctgagtgatgtcaggcccgcccgcagttatccagaggcctgaccatctccctgtgatgctgtgcttcagtggtcacactcctgtttcactttcctgttccactctgtatacctggctgcaccctctagatagcagtagcagaattagtgaaagtattaaaatattaaagtctttgatctttctgaaaagaacataaaagaaataatgacataagctatcctctctctctacgccttggctacctaacatagaagggctccctgtccagtggacacgtgactcacatgaccttatcaatcattggagatgactcacactccttactctgccccttattatccaataaataacagcgcagccaggcatttggggccactatcggtctctgcgtcttggtggtagtggtcccccaggcccagctgtcttttcttctatctctttgtcttgtgtttttatttctacgatctctcgtctccgcacatggggagaaagacccacagaccctgcagggctggtccctacagtggcgcaatcatagctcactgcagcctccaactcttgggctcaagcaatcctcctgccttggcctcctgggttgctgggactacaggcatgcaccaccacgtctggcaaagttttaatttttttgtagagattgaggtctcactatgttgcccaggctggtctcattctcccgggctcatgcaatcctcctgcctcagcctcccaagaagtggggattacaggtgttagctaccacaccccactaaaaagctgagttctgtgtttcacgacagtgatattatttatagaagtagctggggaagttataaatcatgcgacccctggttacgtgactctggagcacatatagaaaaggaagctaagggatggcaggtcattcttcaacccacgactgttctttagcaaagttccagcaccttcatgattctaaccttgtcttatgaatgtgacttcaggccaggcacagtggctcatggctgtaatcccagcaccttaagaggccgaggtgggaggatcacttgaggtcaggagttggagaccagcctggccaacatggtgaaaccttatctctactaaaagtacaaaagtcacctgggcatgatggcgggcgcctgtaatcccagctactcaggaggctgagggaggagaatcacttgaactcaggaggtggaggtgccagtgagcagagatcatgccattgcactccagtctgggcaacaagagtgaaactctgtctcaaaactaaataaataaataaaaagtaaatgaatgtggcttcaatctctcaacaaggactgggggtcagttttctttgtctcaaagtttaactatgaattaaattcctctcatggtaattttggcctctgcactagaataagaaaaaaaaatctagcctgtgaggttagaaacaagatggtcagtcatgttagctttctctcattacttacatttctgcgaaggcagtttcaagaccccccttatgaaattaatcagcttccccccaccacctccaaattcatatgttggacttgtaacccccagaacctcagaatgtgactgtatttggacataggattctttttcgttgtttgctttttgagacagggtcttgctttgtcacccaggctggagtgcagtggtgtgatcgtggctcactgcagcctcagcctcctgggctcaagcgagcctctcacctcagcctcccgagtagctggaagtgcaggtacatgctaccatctccagctaaattttttatgttttgtagagatcaggtcttgttatgtcacccaggctggtcttgaactcctaggctcaagagagctttccaccttggcttcccaaaacgctgggattataggcatgagtcatcgcactcggccagacataggctcttaaaggggtgactaagttaaagtggggtcctgagggtggcctggaatttggtttgattggtttattttattttatttttttttgagatggagtctcgctttgtgccctaggctggagtgcagtggcgcagtctcggctcactgcaagctccgccttccgggctcacgccattctcctgcctcagcctccggagtagctgggactacaggcgcccgccaccacgcccagctaattttttgtatttttagttgagacggggtttcactgtgttagccaggatgatctcgatctcctgacctcaggatccgcccgcctcgtcttcccaaagggctgggattacaggcgtgagccaccgcgcccagcctgattggttttataaggagagattagggcctctgcaagaggcttcaggagaaaccaaccctgccaacaccttgat[134 bp omitted]caacatggtgaaaccccatctctactaaaaatacaaaaattagccgggtgtggtggtgtgcgcctgtaatcccagctactcgggaggttgaggcaggagaatcgcttgaaccccggaggcggagcttgccgtgagccgagatcgcgtcactgcactccagcctaggcgacagagcgagatgctgtctcaaaaaaaaataaataaataaataaaataaaataaaataaaaaagaaaaagaaatcctgttatttaattgcacccaatccctggtacttggttatggccgccccagcgggatgaaacagccctccctgcccccacggcttgcctgagcctgggtctggggcgtgtgcgcatgcgcggtggagcttgtgctccggaatccggtgcggaggcttgggctccctgcgcttagcggtgtagtcgctggacagctccttcagccggaatctccgcgggtgaagactgcggggatcctcggtgccaaagcttctgtggtcctcctgctttccttttccccctgtgggaggaggtcgcgggctggaggtgtttcctcctggtcctgagcagggccaacctggaggtaaaatggcccctgcgcctttaaacagccctcctcggcttgtaggccctgcttggttgctccagctttttcagctgttccagagctcacccggagctattttcatccgtgggatcacgtggagggctgggactttccaggcttccttagtgatgtcacccttctgtcattaggcacccgagaccagtattcaaaaaaagaatgttgtcgttatataactatattggagataagtattcctcaaaacagattagctaatcctcctatgcatctggctgtctaataaccatcatatataatatcatactcaaatacccagaaaaagaaatattgaggccaggcgtggtggcttacgcctgtaatcctagcactttgggaggctgaggcaggcggatcatgtgaagtcaggagttcgagaccagcctggccaacatggtgaaacaccttctctactaaaaatacaaaaattagctcggtatggtggcgtgtgcctgtaatcccagctactactcgggaggctgaggcaggtgcttcatcctgggaggtggaggttgcagtgagccagatccttagggccaactctggttcatttaatgtccatttttagaaaacctgtgagctccattcacagtgaaggtttgaagcccagaagtggcctcccaacagggtaccacatttcccagcacctttgcagctaggtgtggtcatgtgagcgagttatgtggtcatgtgaccgagttccagtcagtgcaatcgggcatctgtggggagcaccgcttccaagagtggctcctagaaacctcccatactaccctcctgcctactcttcctgaagcccagcactaagcgtcatcccaactcgatgggttttgaattttttttttttttttttgagatggagtcttactctttgtcgcccaggctggtgtgcagtggtgcaatctcggctcactgcaacctccgtctcctgggttcaagcgattctcctacctcagcctcccgagtagctgggaacataggcatctgccaccacgcccggctaattatttttgtatttttagtagagacagggtttcaccatgttggccaggctggctcgaactgctgaactcaagtgatccacctgcctcggcttcccaaagtgctgggattacagttgcgagccaccgcacccagcttgaattcttattttttaaaaatagatatgaggccataatcctagcactttgggaggccaaggcaggagtatcaccaattttagaacaggatttcaccagggggaagatggtctcccctgctccccctaacgccaggctcacctcttcagtgcccgcaactccaaccatcgcaggatcttttcactcctagacctgaccatgccactgccccgcctgcgggataaggttctacacctcgcaggagctcatgaggctctccacagtatagttagtagttatagatgcagggtcaaggagctgacagcatggaccaaaccctggcccaccacttcctagatagtggacctagggaaggtaacttacatccctgtgcccctcagtgtcctcacctgttaaatggggagaataaaagtacctacctggtggagccatcatgagggtcactgaggagtgaggatgaccctgactagcttcagcagagggacatggcggccgtgtgtggcagatgtgttcctggggccctgcactggtgcagggaggaagagccaagcccaaaggaaccatggtctccacacaaagccagtaatgtggggatcccctgacatacaacatttactttttttttttgccttaaacattttatttgaaattgaaacacaaatgcacactaatttgccagttctttaaggcagagctgtatcaggaactcttagctatgagaaacaagtcttttttttttttttttttttttttgagacggagttttgctcttgttgcccaggctggagtgcaatggctcgatctcggctcactgcaacctcctcctcccgggttcaagcgattctcctgcctcaacctcctgagtagctgggagtaacaggcatgtgccactacgcccggctaattttgtatttttagtggagacggggtttctccatgttggtcaggctggtcttgaactcccgacctcaggtgatctgcccgcctcggcctcccgaagtgctgggatgacaggcatgagccactgtgcccggctgaaagccatgttttagagtggcataatcgccctggggcttattcttcccctactcccatgaacaaaagcccacagttaggcagctgctgccctaggttcgccggtttagggtcgtcaggagagtttgttactctttttcctcatcattacaaggtggtgacttggctccagccatcatctctagtcaaggcaggaggaggggaggagctgccacaaccagggctgtcctttttggtcaggaaagatgtttctccagaagtccccagcagcccctgtgcttatgtcccctgggtctgcccacacagggctacagggccactgctagccccaaggagactcggaaggcaatgttgtcttcttgggctacaacaaatagaaacagaatgcccaagagattgtgtgcacaagagaccatgatggagacacaggaagagagacagggaggctgagtcacagtgacagacagcaaagtaagcctggcacagacttgcacggcagagagcaaagcctcgcagatagagaaggaaggggagagagggcgggtgggagacaagggcagaggaacctgatgagagagaagggaaggagggagggcagatgtgagaggcagaaacagagtgtgaggggcaggggacagctgggagccctgtgtcccccctgcgggagtatcaggacaccctgacactctcatgcccggaagctcctgttccacgctgggccccggggttagaggcctcctgctctggaagacccgagcctgggccccgctccgcgtgcagccgttttccccaagccagccccgtggtgcccagggctgggtgggtgttccaggcatcctgcttgccttgtctgaccatttcccgatggttttcctctaacatatcatcccatgtggggtggctgcaataataacagcccccatagatatccaggtcttaatcgctgaaacctttgatgtgacctattttttttttttttttgagatggagtctcgctctgtcgcccaggctggaatgcagtggcacgatctcgggtcactgcaacctgtctcccagattcaagtgatcctcctgcctcaccccactagtagctgggattacaggcacgcgccaccatgcccagctaatttttgtatttttagtagagacggggttttgccatgttggccaggctggtctcgaactcctgacctcaggtgatccacctgcctcagcctcccaaagtgctgggattacatgcgtgagccaccgcgcctggcccttttacatttttattaattttattaataaaattagaggagatgaagtctggctgtgttggacaagctagtcttgaactcctggcttcaagtgatcctcccacctcagcctccccaagtcctccccaaggcgtgagccactgtgcctggcctctgtgaatgtgtgatcttatgtgactaaagggactttgggattgagttaggatcctgaaatgagattatcctggatcatccagggggccctaaatgtaaccacttgagtacttggaagagagaaacagagatctgatggaggagaggacgtgacctgatgacctcaggagagagatttgcaggtgcgatgctgctggctttgaggacggaggaagaagccatgagcctaggaaccaggtggcctctggaagctggaaaaaggacacagtttctctcctggagctcccagaaggaaccggccctgccaccactttgatgttagcccagtaaaactgattttgaacttctgacctccgaaactgtttagggaatacatctgtgttattttaagacactgcatttgtcttccttaacagggctcacgatggtgcctccctgtgggatggctggaaggttaaacaagttaaaaaatatatgtatgtaaagattttagactactgctgtccaatacaattaaataaaatatttggtatggctgggtgtggtggctcacgcctgtaatcccagcacttaggggggctgaggagggtggatcgcttgaggccaagagttcaagatcagcctggccaacatggcgaaaccccatctctactaaaaatacaaaaattagccaggcgtggtgtcacattcctgtaatcccagctacatgggaggctgaggcaagagaatcacttgaacccggaaggtggaggttgcagtgagctgagatctcatcatcgcactccagcctgggcaacagagcgagactctgtctcaaaacaaaatcaaaacaaaacaaaacaaaacaaattcgcatcctctgtcatgctggccacctgtcaagggctcgggcattgcaggtggccagtggcggtcacactgcacagagcagatagagaagacgcccaccactgcaggcagttccatggctggcactggctctggcagttcctaggccatggctacatggctacatgctatgcaggtgacacccatgacagctttgcccccagagcccagcacagaccctgtcacaaagtagctatccaataattatttattgaaagaaatgacgggatgaatcccagactccggagtaagccaccccctcacacacacacccctcccctgactctcaaaatccacagcctgccacagcagatttgctaaaaagcaaaggcaataataaccctggggtccgtccaactcatgccctgtacccaggccctaggagggcgagggcttagtaggtatcttcagggtcagagcctgagtcctcgccttgttggttctgaatctgactttgcttccggtacaaacaggccacctgcggagagagggtgggacggggtggtcagaagctccctggctgctcccacctccacaaggttccagagaggccaccacgctaaaaagctggtagggccaagcagctgggcggcccacccctgcttcccaggacctcacctgagcactggtggtggcctgctccggctgcttgtcttcacggactcgaataaaccgagggaagcgaagggagatgcccttgtcactatccacctgcggaagcgggatggagactcctgcggtccagccccagcgaccccctgctcagtctcctccctcctccactctggactgtttcctgatccacatgacggggccgaacgatgggttgtcataaggattaaacaagttgacaaagtgcttggaacagtacccgggca[156 bp omitted]aaaagaaattagccaggtgtggtggcgggcgcctgtagtcccagctactcaggaagctgaggcaggagaatggcgtgaatccgggaggtggggagcttgcagtgagctgagattgcgccactgtactccagcctgggtgacagagcgagactccaactcaaaaaaaaaaaaaaaaaaatgccacctgctacagccgttacgataatgacggtaattcgggctgagaggctgaactacggcgccagggtatgggttctagaatctgactgtgggattccaatcccagctcccaactctcaggagccgcgtgatgcaggggcagttactcaggctctctagggctctacatcctcaccgtaaaatggagatgtttgtgtcactacgtcttacggattttgagaggattaaatgagtgtctatgagtgacacgctgatgaccacacagtgcccactgcacagcaagggctggatacacaccggctcctgtgccttgttactaagggtccctggctgtctaacgtgcagcatggtaaaacatttt[131 bp omitted]accccgtctctacaggcacgggtcaccatacccagctaatttttctattttttggtagaggtggggtttc[133 bp omitted]tcttttctttttttgagacagagtcttgctttgtcacccaggatggagtacagtggtgtgatctcggctcactgcaacctccgcctcccaggttcaagcgattctcctgcctcagcctcctgggtagctgggactacaggcacccgccatcacacatggctaatttttgtatttttggtagagatggggtttcaccatgttggccaggctggccttgaactcctgacctcaagtgatctgcctgcctcggtctcccaaagtgctgggattacaggcacgagcccccatgcccggcccatttttaaagaaaaaatgttttgatctttttatctgacactcaaataaaatgcaagctcatcttcctgatccttacctggaagagcagatgtgagccaaggtcccctccctactctgctctctgtgtgcccgcccagaatcccacacagggccacggccaggtcctctgccactcaccaggccccgcgcagcagggtagatgggagagagggagaggtcagcgcacttcacctcccacacagcgctggggtccagccagtggtcgggaatcacagcgccatctatccgcacgtaagggcgtgggctgggcagcaccagcgcctgcagtgagcagaggaagagaggaacagagggtctggaatctcaaagtcaaggccaagtgttggagggctggggagagggaggaagggaaaaaaacaggcacccccttgaagtaaacagaaataggaagtgaaataagggaaaagaaacaagacacccccttgaagtaaacagaaatagaaagagaaacagaaagtgaaagaagggaaaagaaacaagacccccttgaagtaaaaagttgagaaaggtgggagttgggaggaatgggagatggaaagaaatgaaaggccctgggggctgaggcaggacattaaagacaaaaagaggcagagaaagggccagagacctggaggaaggagacagagacacagtgggacagggacagagatgtagagagagagggcaatggagagagagaaccaaagagtgggacagagatggtgtcagggtccgtgtgtccccacccacatcttgtcttgaatcatagctcccaaaatccccatgtgtcgtggagggacctggtgggaggtaactgaacgatgggggcaggtttttcccgtgctgttctcgtgatagtgaggaagtctcacgagatctgacggctttataaagggcagttcccctgcacacgctctcttgcctggcgccatgtaagatgtgcctttgctcctctttcgccttctgccatgactgtgaggcctcc[135 bp omitted]cctctgcatcctgggttcaagcaattcttctgcctcagcctcccaagtagctgggaccacaggcatgcgccaccacgcccggcaagtcttgggttatttcttcatagcagtatgagtatgaaaataaactaatacagatccaatatgtaggacagacactcatgcctgaaatgcctgtgaccatgacaacattcattcacattgatcagggctcacaggcacttcacaaggagcagctatggcacctgctgtgtcctttggctaacccctggtgtgaatgaggcacagggcttggggaggtgaggctgcttgagcagggtcaccagctagtagccggcagtgctgagacatgaacctggagatgctggactccaaagccagctccactgcctgctgccctcctgcccacacctggagccccaagatggtggaagccaagagccctgcatggaaggactgtgctgtcaggggcaggggggagaggggtggaggctgaggcgcagccgccatggctcaccttgaggctctggtgatgctcctccagctcctcatcactgaagccagttccaagctgcagggaggaagcgggaggtcagaggctcagccagccacaggcccagcacttgctcctgccatctaaagctgtgtacactcatggcccccaccccactctggtctacgcagtatccacagaaaaccagggaagtagggagctgggggtgcggagcatccatccagagactcccgggtgggaatgttctcccagcaggcctgccgtgaaccactccctgtcttctgctttatggagaaactcttgctgcttccactgtctccctggccccaggaagtcactcccttatgc[132 bp omitted]ctgcaacctccacctcctgggctcaagcaatcctcctgcctcagcctcccaagtagctgggaccacaggcatgcaccaccacgcctggctaattttttaaaaaagtttttgtagaggtggggtctcactatg[132 bp omitted]acctaccaaaataggaaaggctaaaaattagcagtaatgctggatgctggcagatacgcagcaagtgggcaataatcaccaatataaacgtcacctggaaagccccttttgcattgagagtcttaaggattctttttgccttttgtcctgacaatagctcatttaaaaatctattctaaataatgcaaaatggtgacaatgtagattggtggccaaaacatttgtgatttataaaagtcacttctgtcactgatcgtttaggttaacggacactaagtaatcacattacccatcagaacaaagccggcaacaacttccccacacagccacggggagctggttcaggacacagcactatgtgctatggggcacagcacttgaaaactcttgtgcgggcattcaggtcctgttgccatattgcttaagggcatatacaacactgaaaacaaagtacttccagggtaaaaaggcagaaaagaaaattactcatagagaaggatcacaactttgcaaaaatgtaaataaaacattccctcaaatgtcactactgcgtgtctctgggtggtacgattctaggtgatattttgttctgtttctgtggcaaaagacccaaatttgttggagaggggaatataggaaatacgtaagaaaatctagtccaaaatgtgcacagctttaagaaaaactttaacttgaaaaaaagtaaatcactttacatttcccagaattccttgcagctaggggtgagccatggagcaaagtgatgagcaacagaacttgagcagaaggtgttcactggctgaggctgactcagggtccaaccccctttgctcttccctggtgcgtggagcaggcatggccatgagggctggaactcctgcagccacattgtgatgatgaggccagaggcacatggcagaaaaaaaaaatgtggggacaaaaaaaaatgtggggagaggaggaacctgaatccctaatggcatcagactgccccctccacacttctcatttcataacaaaaaaattcttttcttatgtgagccaccactatttgtagctaatctcaatctctcactgacacacattcctgacatctttctatcccagcctgtttttctatatgaagcaagagttgctcatagaaccagaaaaagtaaataaaaactggggagaacggatccttcacagggggatgtgagcacccctcggtctgggttgtgcaataggaaatacccccgggagtctaatctccttccctcctgcttctgccatcagccccagttccccaggaccttgcatatggcctgcagctcctcactgtcctcgtcgtaggaggccagcaggaagcccccgtaccggccggcccgcttcccccggcccaggtaggcgccgatcaccaccaggtccagggtgtcacccacgccatcaaggtagtccttcttcagctgggagaaggggaggcaagagatgagaagggggagcgcccaaggcggggccctcactgctggggaggggctcctcagtggactgaggagggactagaagtaagtctgaagggaacttccagaaggaaccccaaggatggcccctgggaagagactggacatgggaagggtttctaggtttaaataagaacaaatggggccgggcacggtggctcatgcctgtaatcccagcattttgggaggccgaggcgggtggatcacctgaggtcgggagttcgagaccagtctgaccaacatggagaaaccccgtctctattaaaaatacaaaattagccgggcgtggtggcgtgtgcctgtaatcccagctacttgggaggctgaggcaggggaatcgcttgaacccgggaggcggaggttgcagtgagccaagatcgtgccattgcactccagcctgggcaatgagagtgaaactccgtcttaaaataaataaataaataaataagaacaaatgggaaacgcaggcgggatcgatgggacctcaggagtcagccttgccgccgtctttccctcaggacagagacgtggccaactcactctggccactcctccaaagggagagcattttcccattcgttcagaaacgttcactaagtgctaaccatgtgccaggcagaagctcagccctgggggcacaacagtgctatttcctgagacaggaaaggtctgtgctggagggaaaccagccacagacagacataagtacacaggaagagctagtcagcaggcctggccggctcagtgccacaatgcctcccgctccagtccccttgtccacccctcactgcccctctccactcaaacatccatcaactcttactgatgacaggctcctgctcgctggccctcaacacacccgtcctccactcgaggggaaaccccaggagcttcgcacaatgacaacctgtgactcccggcacggaacccccactgacttcctgaaaccttcaagaggaagatccagttttatctcacagtggccccaggtgctgcctcatctggggcctgctccccactctgagctcacctcccgcctcgcctgcccttgctccctgcacacgcagaggctgctcctccctcagggtctctgcaccgggggttttcctccctagtgctctgtccctcactttgggaaagactcttcctgatcatccggggcactcccagccccgccttgctggcccggagctgacttgcttttcttcatggcgcccactcctgcctgactttctcttattcatgtcctggcttaattcctgcccaagagcctggcccgacacgggcggcaggctcaggagagagacacctcatcacgctgcacctcgtgggatgtgcggtgcttgggctggggctgttctccatcagaactcgtgagcaagggctcgcagcagggagaaggtctgaactcagttgcagcagggggctggggtgggattgtgaaaaggggccctgagctcagacagggtacacagtggaggctcgaaatccactgcctagctgggacagacctccagacccggggtggagaaggcccagttgggggtcgagaatcaccttgagccagttgtgcgatctcttggcgatctcgtaggtggcatcaacatccagggtcttcaccatcagcccctcgcaggagtctgagggagacacagaagcgtggtccttgggaagccctggctcacaagcgccggagcaggcaggattctggtcaaacggtccaggactggggacaggctgggaggccggggtcagcgcaagctgcagacctcaggagagaaaagtgagcaccctcacctttcactgactgctccaggaactcggcgatctgctcgatgtccttggtgtccagggaggtggcgaagacaaactcgccctctgtctccacaaagttctcccggagcagctgccggcgccgggaaaggggctcacgtaccagggactgcagggccggcagggagaagagagatgagacatctttgtgagaataaagacaataagccctaaatgtgaggcgaacaggacatgtgcgggtcacaactagtgacagggttcgtggaaagccttgagagggaagaaccctgatgtcagaaggattctgagagcttaaagcatggggctagtcactggcaagagggcccgacaccatttagagtcggtgacttcaggagcatcagacggggggctgcggccttgctggagcttgaattaacactttacgggcatctcatcagttttgttttttgtttttgtttttttgagacggaatctcgctctgtcgcccaggctggagtgcggtggtgcgatcttggctgactgcagcctccgcctcctgaattcaagcgactgtcttgcgtcggcctcccgagtagctgggactacaggtgcacatcacaagagatccacccacctcagcctcccaaagtgttgggattacaggcgtgagccactgcatccagcctcatccccaagataattaaaaaaaaaaaaaaaagtcctcctttccttagaattccaaaagttttcactgagtttttccagcacatttacagttttgtgttttgctttgaaatcagttccagctggaccttgcaagagtgtgtgtcagagaggaaggaggtgatctgagtgtttttaaacaaaggacaaagcagttgtctccacatgtcaacactgactaatccgtcttgtggctttgaattgcttttctcttttgttcgatcggtccccacccacgcgcagtgtttctggtctgccctttgctcagggcttctctgtgatgatgttaaactaccttcaccacttgccctccagggggacattcacgtgttttccatggacagcttttttctgttgtaaaattgtgctcatgaacattttgtatgaaaagatgagagagaggagccacaagggttaagcaggtacaatttatctggggtcagaccatttcaggtttacatcccagccacacgcttcctagctggtgacttcaggcaagcgtttccctctgtgtacctcagagctcccatctgtaaaatgcagcaatacctactcagggcacgtctgggaagatcagctgagcccgtgctacccagtgtagccgccaccagccatgtgtagcaattgagcccttgaaatgtagcaagttcaatcggagatgtgccaagggcaaaacagtcactggctttagaagacttaatccaagaaaagagtgtaaaattccatgttaataatttcttatattcatcacacattgaaaggataatatcttagacattggattaaagaaaatatgattttatctgtttcttcttaccttttaatatggctactagaagctctaaaattagaaatgtaggctactgcagtggctcatgcctgtaatctcagcgctttggaaagcggaggtgggtggatcacctgaggtcaggagttcaacatcagcctggccaacatggtgaaaccccgactctactaaaaatgcacaaattagctgggtgtggtggtgggtgcctgtaatcccagctacttgggaggctgacgcaggagaatcacttgaacgccagaggcggaggctgcagtgagccaagatcacaccactgcactccagcctgggcgacagagactgtgtctcaaaaaaaaaaaaaaaatcatggggatgaggacacattaaacagaaaaaaaatgatatacttgactacataaaaatagttcatccatgttcaactactactaataaaaaaatttgtaaaagtaatagctcaaacaagtcctatacaacaaaataggccatcaataaattttaaagaaggaatatttgaaggaatgagaagaaatatttgaaatgctcatgggagacaaaggaaccagctgagcagggatgatcaaatcctgcagaaaaacccacaaagtatccagtgtttggaaagcacctgatacttgactttcctctccccagacatcacgggaaacaaaaatcagactctgactgtcttcctacagtaatttcatgtagtgaaacatcagtctgcatcatgaaattgggggtttgagcatcaaaggcatctctgcattagaaccactaccagctccacctgtcccggcgaaggacagatgggcctaacggagaaaaaacgtttacagaccaggaagacatgagtgagaacccaccagacaggcaggcaaaagacacgcggaggcaagtcacggaacaaatgcacgcggccaacaaacctgaaaagatgattgatcatcaatatccattaataagacagaagtgaccaagttaccacaagatcgtggttcatctaccagatgatcatctgggatgggccgggcgtggtggctcacgcctgtaaatcccagcactttgggaggctgaggtgggcagatcacgatgtcaggagatcaagaccatcctggccaacatggtgaaacaccgtctctactaaaatacaaaaaattcgccaggcgtggtggtgcacgcctgtaatcccagctactcgggaggctgaggcaggggaatcgcttgaccccaggaggcggaggttgcagtgagctgagatcatgccactgcactccagcctgggcaacagagtgagactccatctcaaaaaaaaaaaaaaaaaaagattatctgggatattgatgattgcagctaattttttttgagagcttccatgtactaactactgagttccacacccctatcccactgtttagccctcaccctaacagataaagcacctgccactgttagctccttactgtagatcaagaaactgacacacagagaggctgagtcattcatctgtagccatgccgctaggaaggttagggctgggatatgacggcatgtggcctggctccagattcctgacatcctaaagcaagctgttctcaaactgttgtcttgaggcctctttaacactcttaaaaattattcaaggccaggcgtggtggttcacgcctgtaatcccagcacttcaggaggcca[134 bp omitted]gaggcaggagaatcacttgaacctgggaggaggcagttgtagtgagctgagatctcaccactgcactccagcctgggtgactgagcaagactcttatctcaaaaaaaaaaaaaaaaattcaagactcactccatagagcttgttcatgtgggttacataatattatagttacacctattagaaatttaaaatgagaaattaaaaaaataaatccaatatgctcacccaaataatattaattttttttttttttttgaatagacacaaggtcttttctatattgcccaggctggtcttgaactactgggctcaagcgatcctcccacctcccaaagtgctctgattacaggcgtgaaccacagtgcctggctctaaataacatattttgatgaaacataacccaagttttgagaaagtggtgagactagaggcattattttacacttttgcaaatcctctaatatctggcttaacagaggctggattctcctgcgtgcttctacgacacactcttctcgttgcaggacctgaggaagatccacctcacgccaatgtggagttggaaagagagggaccttgaagatgtccttgaaagaatcttaaggaacctcaggggtcctcagaccacactttgagaactgctgcccaagtgtggcttcctggccatgtgaagtggcagagtcggaaatggaagtcagaggggcagctgccaggctcacaccccaccccgtcacccctcagctgcccctggacaggaagctggaactcacctctccattgaggtagatgaggtcgaaggcgtacaaacacacctgcacctggatctcagacgcatccacctcctgggttggggcacaacggagttcgtgagtgcaggaaggtgagacggggcactgtgcctgaggccgacagcattcatctaccggtctccctctcgccccacctaactggctgcccatctgtgagggcggccatgctgctggctccaggtgctggatcgttaacggctctcagctaattccgacaacctcattccccttcaccagatatttgctctcctagacttttctgcagctaatggcagtgacatggcacagttctggccaatgagatggaaaaggggaaacctgtggggtgcaggttgtggggttttccagaacagatcttctttcatagtaaaacaacagagatgcccgaaaagggcccttcccctcttcctacttgggatgctgggatgagaatgcgatggctggagctgtggcagccattctgcagaaggctgagagaagtgcatccagactgacactctgcccttctgggcactgggcaggacccacagccaggactgggtggaagatgaggaagtacggggccttggcaggcagtggagcgggtgatgctaccttgcgtttgcgggtggtgagcacttggaatggctggatctgcttcttttcccggtcccaagccacggcttcggtgtccaggatgaaggatgtgaccgatgggagtttaatctgaaaagtgaagggagagacccagggcctgagagaggtggaagatgaggtggaaagacaaacacggggagataaattcccttttccttctgcagctctcaagatgcactaacaaagaggcaggtgcacacagatgcttttcttttattccccaccaagaggagacagaaactaatgtctctgagaatgtaatatttggtctcacaagctggaaacctaggagctcttgtcatctccctcctcctgtcacccacattcagttcctcagtgaacctgatgatttcctaagccgtccacttcccaccaactccctgctcagcctcgcctactgggcttccctgtcctgcaccgatcccctccaatccagcttccccatagcagccagggtgacactggcaagccccaaatccgatcacagcacctccctgctaaaaaccatccccatgattccccaaagctggggggactctcccgggtcagcctgggtcgtccctcgcctcacctggccccctgagcctctcttcaccccagcacgtgagcctctctgtttctcaaataagtgggcaatgcctcttccactactgggcctttgcatgtgccgttccctctagaacccctgcccctgtctgtctcctccactggcaagccttcttttccctcaagggaacactgttgcccaagccgggggcagcattcatgttgtatcctggagccaggtagcttccctgacaccaagtctaagccacacctatttctttttgagtcagagtctagctctgtcgcccaggctgcagtgcagtggtgcgatcttggctcactgcaacctctgcctcccaggctcaagcaattctcctgcctcagcctcccgagtagctgggattacaggcacatgccaccatgcctggataaattttgtattttagtagaaacggtttcaccatgttggccaggctggtctcgaactcctgaccgcaagtgatctgcctgctttggcctcccaaagtgctgggattataggcgtgagccaccacgcctggcctcttttcttttttgagacagtctcccactgttgtccagcctggcgtgcagtggtgcaatctccgctcagtgcagcctctgcctcccacgttcaagtgattctcctgcctcagcctcccaagtagctgggactacaagagcacgccaccacatccagctaatttctgtatttttagtagtcagggtttcaccatgttggccaggctggtctcgaactcctaacctcaagtgattcacccgccttgccctcccaaagtgctgggattacaggagccactgtcaccggccaggcctgtttgttacataggctcacagaatgctggtcctttcctgtggagcccggatctccacatataatttacagagccagctgcaggactctctggtgaaggtctgcctgctctgctgggctgtgagctcagtgagggcagagaccatggcaggcctgttacactcccagcctccagcatggggcctagctcggagcagatgcccagtaaatacttgctgaacgaatgagcaaaagcagccagatgcaagagactagtgccatattataccaccaacaggaagctctagaacaggtaaaaccaacctgtggcgaccaaaaagcagacctggggttgcctctggtggatgcatggtgttggacagaggagggggccttgcttggccagggacacaaggaaatatttgattttttatttttatttttttgagatggagtcttactgtcacccaggctagagtacagtggcccgatctcagctcactgcaacctccgcctcctgggtacaaacgattctcgtgcctcagcctcccaagtagctgggactacaggtgcgtgccaccacacccagctaatttttgtatttttagtagagatgggatttcaccatgtcagccaggctggtcttgaactcctgacctcaggtgatccacccgcctcagcctcccaaagtgctgggattacaggcgtgggccactgcgcccagcggaaatatgttagaatgatgagaatgtggaaatattttatacattcattggggtgtcggttacttgggtgtatgaacttttcaaaactcatcaaacagcatagtgcacactgaaaatcactaacttttagggaaattacatcttaagaaaattgatttaaagaacagtgcttggcacggaacaggagctcccctaacacgtgcactgaactgtgcctctctctgtcactgtctctaacaggcagaatgatgggcaccgtgccccctgctttcttaaataacttatttcctatttaattaggggcaggcaaagagaaaggctctttgataggggactcctcgaacaggcacgagacccctactgggtgcagagaagtccccaactctggggcctgtgaggcccagccctgtatgactctgagctgctatttctgaggcttggggcctatccacaggctggccccctccaaactcgtcctgactcctcctccccgcgttcctggctggagaggctgcagagttagactctggctttccgaggctttgttgcactagggtggccatggaacccagtgctggacagtgactcccagctgcagtccacggcgggggaggggttgtgggtgggaggtgtccaggaaagtgttaactcaagctagaatcccttttccctctttctgtctggaagaatgacatctgtttgggaaactctaaggggacaagcattggcactaaaagccaaccagccaaggacagcaggggatagaggtagcgataagcttggttcagggggacatcagtgctcagccaagtcggtgctggggtgcccacctctagatgtgagaaaaaatcatatgggcttacaccacgcaggactgagtgctctgtcatttgcagccaaacgcaacctgatctcctcccaataaaccccgcactgtgccacactggcctagatgggcctcaggcctttgcacccctgaccacagaccctggcagagtgcaagtgtgtggcagacgcccaccttggggatgcggctgatgatgtccgggtacttcccagtgttgtcttcctgattcctgctgaagatcttcacctccccgccttccagggcgtggatctgtcacgatgggagaagggaggggaaatcagctgagtcccctcatgtggcctcagctttctcttctgaccccacctgcactggtagaaggttctggaagctctggaggaggaactggtgcagagacttgagcgaatcatctcctcagttccaacagcacctcccagccctgctctggaaggccctaccatcattttcttcttcatttccaatccctacacctctccccatgtaggcacatgcaccttgctgcatgtgggtgctgatttgtttaaatgtcattatgctctagatctcattctgatttttttttgaggcggagtctcgcccaggctggagagcagtggtgcaatctctgctcaatgcaacctccacctcccgggttcaagagagccttccgcctcagcctcccaaggagctgggattacaggcgcccaccaccacacctggctaatttttgtatttttagt[136 bp omitted]ttgagcagggcggcatatatagcatcttatatgtttgttattatttccaggaacagttgtcaagaaatcattgtcactatcgtaaatcatcttgtgtcttttttctcaacactattttggagatccatctctgatcctgtgtctgttggatccaccctttttttttttttttttttaaaagatggagtctcactcttatcgtggaggctgtagtgtagtggcacgatcttggctcactgcaccctctgcctcctgggttcaagcaattctcctgcctcagcctcccgagtagctgggactacaggcacacgccaccacactggctcatttttgtggttttagtagagatggggtttcaccatgttggccaggctggtctcctcaggggtccacttcctgtaactgccccgagccctgtggctcccacccactttgcctgcttacctatccccaggtgagaaggccccacacttgccaggacagaagagacacaacacattcttacagaccccaggaccaaggacgcctgaggccctggatcacaggacacacatgcacgtcacggcatgaaggggtcatgtaggcacctcccagaacggctgttaaaatgaacacacccaccagcagcatcagcggagcccacgtttcatgagctcccactatcatcggtcaggactctggaggattgtagcttcggataagctggtgaggtagttaagaccacaccctagaggccaggcacgatggttcatgcctgtaatcccagcactttgggaggctgaggtgggtggatcatgaggtcaagagatcgagaccatcttggccaacatggtgaaacctcgtctctactaaaaatacaaaaaattagccgggcacggtagcgggcgcctgtagtcccagctacttgggaggctgaggcaggagaatcacttgaagccaggaggtggagg[138 bp omitted]cgagggctcggcagtctgtggcgcaggccggcttgaagctcaggcctcagtgaccccacacccctgctctttgacgttttcctgtctgtggaagggacatgtcccactccccatacctgtgccctctgcccgtcatatttgtattcgcaggtgaaagctgcctcctcaaagcgtttcaggacctcgctgatgccccgggtgggatgggccaacattggtttcaggggaatccctgggaaaggaggagagtgagttagaggagagggaaggcaatggattagagggggaacatggagaggagaactgctaatgggccccaggaccattctgctttcttgctattcagtcacgaagcctcccacgttttagaaggggacctagcctcccactggggactacagcccccggccttccttccaggtgggaaaggccatgtgattggaacccacgcagcatgtgcaatgtctggctcacatccttgcaaggaatctggttgcctcccctccctcctctgcgtccctcctcccacaattagaacagggaagtgagccacatttgatcacagacattggggtgacaacctttggagggcagagggacacaggaacctgggtccccgggtcatccctgggacacagctgcacacctgtaccttccctggccacctcccttgctctggacacttctgtgtgacagaaagaaattctatctggcctgacccactgccttctggcccatttttatttacttatttattgtctcactctgtcgcccagctggagtgcagtagcgcgatgacggctcactgcagccttgaactcctgggctcaagcgatcctcccacctcagcctcccgagtagctgggatcacaggcacacgccaccacgcccggctcctgtttatcacagcagtgtcacctacaccctatctactccacaaggggaaattccaaggagaaaagcagtgggtttcagcaccagggaggagcatttggttttggtgggggagaggactctgcaagttctgagaggggcgcctacgatggccaccctcacgccgactcaggagggagcagggctgctgccaggctggtgagcgcccctggggcctgtacctgggctcagcttgcagtgctccgggagacgttccaggccgtgctccagcagcacggggataattcggtccaggtcgggaacctcgctggggtggcgggtgagaacaagataggggaagcctttctagaactcacacagtttggaaagagagctcggcctgctcccagaagcctgggctcctggatgcctctgcccactgagtcaccacctgccaagctcctcttgccaccctgtctctgtgctctcccttcgtgtcactatctgttgctttgtctcccttagtctggccttgcccctgttccctatctgtcaccacgagaccagcgattctctactcggctacacaggagaccactcaagaatacagtttttaaaaaaaggtttttggccgggcatggtggctcatgcctacaggcatgtaatcccagcactttgggaggccgaggtgggtgcatcacttgagcccaggagttcaagaccagcctagccaacatggtgaaatcccatctttactaaaaatataaaagttagctgggggtggtggcacgcgcctgtagtcccagctactcaggagactgaggcaggagaatcacttgaaccctggaggcggaagttgcagtgagctgagattgtgctgctgcactccagcctggatgacagggcgagactccgtctcaaacaaaataaaaatagacaaaggttttcaaggctaggttccacctacaaagattttgatgtagctggtgtggggtaggcctgaggtcagcagctgatagagccccacgtgcaggcagagttgagcttgctgcccgggcctgttcaccactctctgctcagcacccagtggggggccctggcccagagcaggtgctctgaggccatctgtggaactgccatcggccctcctgcctctgacatcctctctggggcagtcatgatcttggagtcaccagccctgggtcagctgctggcctaggtccctccacatggctctctctggagccctcgtggccgctccacggatgtcctctccatgactgtcaagacccttcaccatgtgtcagtcacctgctcctctctgggtcccttaaggcctttctgcatgcacagccctgtctggcactcagaaacctcatgttgccggctgccctcccttgctgtcagcgtctttcttttttttaagacagtctcactctgttgcccaggctggaacgcagtggcgtgatctcagctcactgcagcctccaactcctgggttcaaatgattcttgtgcctcagtttcccaagtagctgggattacaggctaatttttgtatttttagtagagacagggtttcaccatgttggccaggctggtctcaaactcctgacctcaagtgatctgcctgcttcaggctcccaagtgctgggattacaggcgtgagccactgtgcctggccgctgccagcgtctttctatacctctcctggggtcactgacccttcactgtttgccaccttcctgatctttgtcaccatccttgtgtcaagcaccagccttgtctagatcaccacctctgctctcagtcaccccgtgaccggcactcgtgatgcctgtccgtcacttcactggccccacccactgctcctctggctccacccccaccctggcactctgcccacagcccctggcaactccacccactgcccagctctcaccagaacgtctgcttcaggatcatgccttgctcctccagccacgtctttctggcctctgctgtcttgcccttcccagcatccaccatggctggtgggaattctaagaaaagacccaccagaggctttggaaggcacccacatccttggctacaccagggtgcagtgggtggtttgctgtatggcaaggaatgcagatgccgcggcccaagacgccccctcccccccacccaggagagaggagcctggtatggcaggggcccgctggggaaggggcgggcatgggcctctgaagaggaggggggaagcctgaggtaactccagcgagggatgcagagacgggccacaggagctcaccttggcccgggggcgtgaggctcactgcctgggagagggcagccagcaccgactgctctgccagcccaaggcgcagccgtccgctcagggacctggggagagagcaggccagggaagggggcttgtctgcacctccccaatcttgcctcctcccttctctgatctcctcgaccttgatgtatgtagaccctctcctcaaaaaccagaagaatcttcagagcctggaagggaccccagatatcacacagccccatgtgacagatgaggaaactgagccaggcagtaatgatcctgcccactagcatagactggggaggggcacaagtaggtgcaccagcacctcccatctcagctgccctgaggggttggcgaggcttgaggaggatgagtcagggagagaactgagcctggcgcccgccctggtgactgtaatggtcaggaccccagcatggtccttgctttgagccagtggcaggagacaagtggcttagtttgcctccccatgtctccatttccccttctataaactggaggtgagggtaacaagaccagtctcacagagttgctggtaggaactgatgaggtaaggcacggggcacagggcagggctcccaagaaatgctccatgatgtgagccctcaatggatttgctctcactgtcatggcaaacaaaccctggcttcctgctgcagggcccgcgcccaagccgaggcagacctcaccaatcaatcacagcatgcttcacccacaggggcccaggggccttctctagacagcactaccaagggacagaagctggcctgtgaaaggaaatggtgtcccttcccactctttaggggctgggcctcctgctcatgcttttctcatccaaggatggtcagggcatttgtgatgattccagctgccagtccctccctcctttcacctccgagcctgcagtccccctctgtagcctcacaggcccacacgcttacctagcgatgaaccgggcttctgagtggcggcaggccacaaagaggcctttgatgatgtctatcttcttggctgtggactggagagtcaggggaagagccgtcagtgcctggtgaaggcagggaccacacctccaccccaccagccgtgctgctgccctgcattttggaatacctgccctccttccctcaccccatccccatgtcccagctcccatggccgcccactcttagggcagtaagaacgagctagctctcctccttgcctccctctccctttatccaggaagtatttactgagtcctgtcatgtggcagccatggcattaggtctgctagactctgaagaggagactcccctaggattgggtgcaggaaggaggagaggaagctgtgcaccccatgagaaggactgatgcgacccagctgatggtctacccagaagccttcctgacacacgcgtggcctcaggtccccaagatgtctggggtccgggatgagcggcccgccccactcacagcactgccagtgagcctggcgatgtcgcggaacttgctgaagaccccggaggcagtgagcggaggtggtggcagcatgagcctctgggtgctgcggctgttctcggccaccagccccacgtcgcctttctcggctgcctcagcccggacggactccagctgccgaccttcaggggagagcgcgggtgggggtgtcgagggtgacagttgtggctgcgtgtctcccttctctcgcggcctggatgaattttctccagctgtgtgtgcttgtggcgagtccctgcacctccctgtgtctaacgctcacccacttggtagaaatggcttggggaacgtgcccccagccacgctggctgtaggaagtcagcaaacatgcacgtggagccaggaaagcggtggatgaacgagcatgaccacactcaggggagacatctgggccggtgtcatcagggcgcggatgggatttaaagccacaggcgggacaaggtcactagggaagtgagtgtggacagagcagagaaggccaagggaccctttcctctggcgggtcatgaacatctctggcagtgaccaaagacccttcggcttgttttggagccaccagcttacacacgtgggatgtgctctggccccacttactgtccagagctgggtcccatgggcgcctgggtgtaagagctggggagatggagcctcaagtcacggtgacagctgtgacaagcagctctcaacctatcagaaccaacacacccttgtcaccagatactgtgtgtcacctcttttctggtctgaaataaaatgtggagataacataacctgcctacacctatcgagataacgccctaaccctaacacagaaaagaatgaaagggaaagcaatccgtaatgaacgaacaagtgcgcgtttcagtccacagatgctcagccgcggcacagagcacatgaaggtgggcctcgcgcctgaagcgaaactgccacaaatgggagagccgacagtgtgagcctcaccaatgggatgttatcgaatcacacatcaaaggggacgggattctccaaagtggccaacaactcacaacaaacccgggacttggacagccacgggggccacaaggcggcacggagagcagtgtgagtgtgaacacgacccatcaagggtggaggcatgagacagtggaagaggccccagctgccatggattgttgggcaggaaagccagcatctgcaacttcttttgtgagaaaaacagatccttctttgtccaagccaatgtagttgggttttctgttacctgcagctcagagtattcttaaccgaccccgtgtgtgctgggtctggtatgacgtcagtgctcccgaaacacatcttgagtgaatgagtgagaaaatcttgagtctcatctcctctggctcccataagcccgtaactctttcctgatccaagtcaacctttctcagtccctctgtcctctcatgaaagcctgaaacccctgccttccctaaatgttggtgcccatggccctaagccagctccagtgctcccagcacatcctctccccaggcggatgagaacccaccagtgggtggtcatccctcctacactgaccagcccgaaccctgggctctgagccagacctggtgagcctcagacccgtttccaaacttcctggatggccctgggggcccacagatagaggttgctcatgcctgccccacgctggggtgattaatgccccctgcaggtgcctgcccctcaccagggtcccaagctgccgacggctttgtcatccatccagtcacccagggagatcctggaggcattcctcctgcctcctcaccctgacatccactgtctgccagatctctcctgccctcttctctcttctctacagctggggtccagctcctcttccccctggatgctgccccttgcctgctcacaatccttccatggctccccagtgtcctcatgataagcaccgagcactccaggcccttggcaggcgggccatccgcatcaccagcctttccacccagcactggcggctgggccccttcaggctgctggccccccacacaccatgttctttcctcccactccttccaatccctccagtcaaagtcctttcagacctctctaagccccaaccttccatctcagcccccaaatcctgctgtctctgcctccagcatctttccccagccctccccttccctgcaccccacaccccctgtcccagcacatgcctggtcctccctcacctgaactgctgcccctgtgttctctcccacacccctgcaaatctgtccccatcaggctctcctccctctcagccttctcctcaaccctgtttcacagcctctctccaccatctctccgatccacctgacctctgcattttctctggctgagctcctgtccttctggtccctccaaccacagtcccccttacctgtggcctgggccactgccttgagaaggacaccatcacccacgccaagctccaggccctgctggggtggcccaaggtggttgaggctgaggtagaggacagggaggaggtctggaggcgacagggccaccacggagcgcagcaagttgctcagcgtctccaccatccggagcctggaggaggggacgggggtatgaacacgtggttcctcaaggtcaaagtgtggtgtcggggtggggtgggtttaagggggtggacactagaaagaaatggagaaagaagaggaaagggctcagaacagtcccaggctctggggcctggagccatgaggacaatcacagattgctggaggtgaaaccgcctttgcaaaaccgtaactgaggaaattatgacagtggaaagaaatcacacctaaccgattccatcttgcttctaacctttaagctgtccttgttcagtcctgggcataggcagaactaactttgggaaggaatttggttcgtggcttgactctgaaacgaaattggtaatagccctttctggaaaagacccctttttgcctaaggacctgccttcgcaagactcacaaattagctacaagattagaaatttaggtttaggggtcacgcagcctctggcttccccgattgctcctggggataacatcactactgtaaaacctaagatgagtgcttaagatagtttgcagaccctgcactcagtctgacgccacccagactgtaatctggctcaacaagttctgccatcccacccaggaacagaagacagcaagaaaacctcccttcgaccccctgtgagtccatcttcaacctgaccaatcagcactccccacttaccaagcccctacacgccaaattatctttaaaaactctgctccccacatgctcagggagactgatttgagtaaaaatgaaactccggtctcccgcacagccagctctgcgggaatgactctttctccactgcagttcccccgtctagataaatcggctctgtctaggcagcgggcaaggtgaacccaccggacggttacagtgggggagtaacttggtgtgacggtaacaatgatgaagatggtgatgatcagcccagagaaacgacagctgatgctacggagcattttctaaattcaggagctggctttgagcactttgcaccttttttttgagacggagtctcgctccatcgcccaaggtagagtgcagtggcacgatctcggctcgctgcaacctccaccttgtgggttcaggtgattctcctccggagtagccgggactaccggtgcgcaccaccatgcccggctaattttttttaatttttagtagagacggggt[144 bp omitted]ctctgaggtaggtaccattattatttccattttacggataaagaaacagaggcaccgaaagagtccgtggcttgcccaaggtcacagagcgagtaagtatgaagctgagatgtacaccaaggccgtgtgcctgaggactgtgctcccagccaccaagctgcaccacctctaaaacgaaaaccgtgtttctgtctaaaacttcaaagctggaaagaatggctttgttactgaaaaacttagggggcctcattagaaacagaagctgggtttttcctacagaagtctcattaccgaggtttttaaggtgcagagaagaaatacaaaaaccaacatcagggaaatccctcagtaatcattgtaggcaaaagccaccattggatggtgcagtggatggaacagcccccccaaaattcaggtccactcagagcctcacaacatgacctcatttggaaagaaggtctttgcggatgtacctgtagattaagatgagagcatagtgaatgaaggtaggctctgaatccaaaaagcatccttacaaaatacagaagagggccgggtgtggtggctcaggcctgtaatcccagcattttgggaggccgaggcgggccgatcacttgaggtcaggagttcaagaccagcctggccaacatagtgaaaccccatctctattacaaatacaaaattagggccgggcgcggtggctcacacctgtaatcccagcactttgggaggcggaggtgggcggatcacgaggtcaggagatcaagatcttcctggctaacacagtgaaaccccatctctactaaaaacacacacacaaaaaattagttgggcatggtggcaggtgcctgtagtcccagctactcgggaggctgaggcaggagaatggtgtgaacctgggaggcggagctgcaagtgagccgagattgcgccactgcactccagcctgggcaacagagcaagactccatctcaaaaaaaaaaaaaaacagagtgctgggaacagcctgaaatgctccactcatgttggggaactgagaaatggcatgtgccatgtgagaacgaagggacactacagagcagtcacaacaggctcgaaccactcaaccaacatggacacatgtggaaacgggtttgatagtgaaggcaagcagaatgagccgtacccatgataattttgtttgtttgtttttgagacagagtctcactctgtcacccaggctggagtgtaatagcgtgatctcggctcactgcaatctctgcctcctgggttcaagtgattctcgtacctcagcctcctgagtagccgggattacaggcacccgccaccatgctgggctaattttgtgtttttagtagagatggggtttcaccatgttggccaggctggtcttgaactcctgacctcaggtgatccacccaccttggcctcccgatgtgctggaattaaggcatgagccactgcacccagcctccatgataatatttatataaactaaatacacaggggcgagtgctgggggtgaggaggacaaggagagaagaggaaatggggacagagaagggggctggcagggaccagcgatgctaacatgctgctgagaaggaccagggtggggcagtgctatgcactgggcatcactggggtgggacgctctgcagggaacctctgtgaatgagtagggggtcctcgctataactgagacctcaccttcttttgtgaatatggagacatgtaagcaagactgaagtcacttttgatgactcagggtggactagaagtaatcacggactgtgtgcaatggtgccagtcatcccgagatggagcctgtctccttaccctgcacatctgggctcgccccttgtgtcttgctctgaccatgagaatgaggcagaaagtcaagaggacctgcagccgcttttgtgaccatgtctgacatccatgatcatacgcccgagcggggtcagaggccaagttgacagggtttggcggaacaaggcagcacagaccgccatgcagaggacagacccagaagcgaccccgccccccacccaggcagtcctcattagttaccgagcagacacctcctcgatcttctcaaacgtccgggccacagccaggtaaggaaccctagggaaggaaaagagacgcaagagtgacagtggtgcaggctataccatgctgcccgtctgcacccttgcttcctcacgcctcctcgggacacccttgccaatacccaaatgcatgagctcacttcccagggctgtctctctgtccctttcaatgctgctgattgtcgccaaaacacaggagggagagacttgaccatttctcccaaccaagactctgcttagagagcctccggtggcaacagggaccggagggggacagtctgaaaagggagaaacctcacttctggcccggtttccagcaggcatcttccacgggatgatagttgttcttggcaggattgtaaccagatggatccaggggtctacggaggcaaaacggagattgaattgcatagagccctgggtcaaagcaaagtcattccttccaactgtgatgtgccaggctctgttcaaggcacacggtgcagagctggatgaaaacaaagtttgctaacctggagctcacattccagcaggagagtcagaggaaagtgggcaaaaagcccccacataaacacatcattaattttaggtgttaaaaaaatctttcagaaaacaaaagaaagccgagtagaggaagaggatgagatgagggtgctgcttcacagggtggtcagggaaggccggagacatctgggcagaatgagggaggggttagcacagtgggcagcaggggacgagcattccaggcagagagaatagcgtgtgcaaaggcgctgaggtgcagacaaacttgagaaacagaaaagggattgcgtagctgagctgggacagagggaggtgcgtatagtcccgggtgtcgcaaagtgccaggtgccatgctaacaccacatcgattaacaatcagacatgggaggaagggacctttccttttttcttgagacagagtctcactctgttgcccaggctggagtgcagtggcatgatctcggctcgctgcaacctctgcctcctggcttcaagtgattcttctgcctcagcctcccaagtaactgggattacaggcgtacacgaccacacctggctgatttttttgtattttcagaagagacgaggtttcaccatgttcgctaggctgattttgaactcctgacctcaaatgatctgcctgccttggcctcccaaagtgctaggattataggcgtgagccaccgtgcctggccagaagggacctttctaacttccttttccggataaggaaactggggcacagagtgattaactcacccatggccacacagctggtaagcagcgcagctctagagacagttcccaacctctatttttttttgagacagggtctcactgtcgcccaggctagagtgcagtggagcaatgcgcactgcagcctcaacctccagggctcaagggattctcctacctcagcttcttgagtagctaggactacaggtgcaagcaaccatgcccgactgatctttgtagagatggggttttgccgtgttgcacacgctggtgtctcactcctggacttaagcgatcctcccacctcgacctcccaaagtcctgggattataggcatgagccactgcgcccggcctcaacctttatatcgtaagtagctcacactgaccccagccaaactctgcattcagactcatctgggttccaatctgctctgccccggccagctgtacctgctgaggaagcagcttcccctctctgaaccacagcatctccatctgtctggggagctaaggggtccctactatgacaggttgtcctgaaggttacataaaaaatgacagtgagggttcccactcctgggtgcacttcatggaacaatgaggactccccagccccaggcctacatctgtaccaaaatggggacaagggttgggggggagaaagagacctcaggatatttttcagctcttcagctgattctgatgctcacacagggcatggatggccaagacagatagtgccactgcagggctgtgcatggcctttggtatgaacttggggtttaacaagcggtggccggcattacaatgaggcagcagagtgtggtgggcaggggagtctagagccagtcagcctggctagaaccacaatgctgccactccccacctgtgtggcctgagcatggcattaaaaacaaataagaatagtagcagcagttaccgtgacaacatgctggtcataatcaaggccagaccctgggctaagtgtttcacatcctcagaagagagacacagaaaggctaagtcacttcctcaaggtcacacagctgagagaggtggagctgggattcctagccagtcctcaatactgtcccacctccccgctttacttttctcacccaggaaaccaggataacaacagaatctactcccagcagtgttgtgaggatttggagcattgcgtcagggaaagcccgttgctgagtgcctggcacgtggggaagagtgggtggaagaacatgcttcctctcatcactgtgcccccatctgagaggtgaggaaattggagagtgggaaagtttgcctgtctcttggaggcagccattggagacagagg[143 bp omitted]aaattaaaggggtttggaataatccctgctgttcagcagaaaggacaggtgggttaaaaagtatgacgcagtgagtccaaaatctctttgatgtcatgcctctacaaatgaaacagataacgacaagaaattctttcagctttaacatttcatgattaaagtttaagtctaacaaaaaagtgtctgtctctattaaaaatacaaaagtagccgggcatggtggcgcatgcctgtaatcccagctacctgggaggctgaggcaggagaatcacttgaacccgggaggtggaggtcgcggtgagctgaaatcgtgccactgcactccagcctgggcagcaagagcaaaactccgtctcaaaagaaagaaaagcagtcgtagtatcacttgaaatagaaaacagaactttatatacagtaggacactgattttatttggaaaacatatttataaatacacaaacacggacacacactcaggaggcacgatatggcaatggggaagaaataactgctaggaatcaaaaacattccttagggtcccaggcctggccctacccccacctccctgtgtgacctggcgaggcccgacctaacctctctgggctaatcatgtcaatgtgtgtaaaatggctaaagtgctcccttcctccacaggaatactgcagagaggacgttaacgtgctatttaacctccttgataaggtctcaattgggggtacaaaattgatgtcaagaatcctccgaacacttttttgttagacttaaactgtaatcatgaaatgttaaagctgaaagaatttcttgtcgttatctgtttcatttgtagaggcgtgacatcaaagagattttggactcactgcgtcatactttttaacccacctgtcctttctgctgaacagcagggattattccaaaccccttttccgttaatttttttttagctttcaggacatcaagaattcaagaggggatgaagtccacgctgctaacaccatcacattgtatttgaaaacacaatctttagaggaaaaaaataacttcagatggatatatgattatgtaagaaatcaggctggccgtggtggctcatgcatgtaattccagcattctgggaggctgaggtgggaggatcacttgagtccaggagctcgacctgggcaatgtagtaggaccccatctctacaaaaagtaaacaaaaattagcccggcatggtggtacatgcctgtagttccagctacttgagaggctgaggtgggaggatcccgagcccaggagcaccactgcactccagcctgggtaacagagcaagaccctgtctttaaaaaaaaaaacaagaaacaaaaaacaaaaaacccaaaaaacctaagttctataaagaggaatttttgtctgatttgtttcctaccagatctcaggcacctaaaatccagtagctaacacgtaatcagtcctttgtaaatacttactgagtaaataaatgagtccatgattgactagtgaaaaaaaaaaatctgaaagtgctcatttaaatttctttcatggcagatttcctgggcttcctaggggccagccccagtgctgggagctaggcaagaagactaagaaggctgggacctcccacagccctggctctgtgggaaggagcttatgtctggttagggaggctctttaccatgtgacaagacataaaagacagtctgactcaagtgctggggacacgcacctcctctcacacatgaagggagaggcacccggcttccctaagcaggtgcaataggagttggggcctgagggaagcctgctgggcagggtgggttagggacagt[131 bp omitted]ggccaacatggtgaaacccggtctctactaaaaatacaaaaattagccaggcttggtggcgaggcacctgtaattctggctacttgggatgtggaggcagaagaatcgcttgaacctgggaagttgaaggtgcaatgagctgagatcgtgccactgcactccagcctgggcaacagagtgagattccatctcaaaaaaaaaaaaaaaaagcagggaggaatgacagcacgtggggacatggtgtgcagagggagcaggaaaaggctgcagatgccaggaggctgcaatgtaaggtggacagggctggctcatgagggcactgggaagcccagcatatcctctatgctggggagaatcgcagatgggttttgagcatggcagagatgggggggtgacctcattactttataggatatttatccacccacgcatccaatcatccattcagccagtcttcagtgcggcctcctgtgtgcatgttagatgtcgtgggaatcagcccagacatctcttcaaataattaacaaaattacagtgaagcaattaattgcttaacaacctattcagtgtcccacagccccagcacactaagcacatcacgagggctggggcagggcggccggctctctatggttcatcctcgtgggccgcccagggctggcaaagaaggggtgttcagtgaattttaaggcagagtagacgcgcct[140 bp omitted]tgaaactgtgtctctactgaaaatacaaaaattatctgggtgtggtggcatgcacctgtaatcccagctacctgggagaatcgcttgaacctgggaggtggaggctgtggtgagctgagacagcaccactgcactgcaggctaggcgacagagcaagactctgtctcaaaaataaaaaatctggtgagttcagagccagaggaacagagaggtaggaagtgaggccagagagggaggtggcagccagtggccaaatgggcttagattttctcctgacggctctggggaaccctagaggggcagagtcaactctgggtgttagaaagatcccccaggctctacggggatcagactgaggatgaaagactggaggcagggtcagagggtggctggggccacggtcagcaaactccgaccctggaccgtttctacaggttctgggatctaagaatggttttgcaacaggggccaaatgtgtcccataaagcctaaaatatttactctctggctctttatagaaaaggtttgccaagtcctgcaagaggaggaagcctgagctgggggtggggctgtcggaatgcagagaagggaacacatcccgaagaacctttccagacctggacactgactcacccctcagcagctccctcctttcctggagcccctggctcctcttccttcacttcttttttgactgctggcttccggggggctaggaatgaagacagaaaacagtgggtcttttctccttccggtagcccccacctcccatccattctgcacccagcaccaccccagtgctcagggagatgggagacaggctggtagagacaaggccgactttccaaccagcaggaaaggaagaagggtcttcgcagcatctcaggcctctggagagaggctcaccagcctcctgcctgtacaaccccgggaggtggggtgagcaagggaaactcactgaagaagctgctgagcgtcttgggagctctgcggggaggcttggtctgctcttcctcctcctgcagttcctgcttcgtggccacctcaggctctgaaacgctttccgtcggggtctctgcttctgcggtgagagagctcagacggtgatgcaaactctttgaccctgagactttttttttctttttttttacccccaagatcattctgaccctgcagatggaagatataactacacctacccttttcctttctgttagctttgagctgagatctcaggcctgctgtctactcctcagtgctaactagcggaattctagcacttggcctgaaataggagacttaggaatagtggtaaaaagaaatctcatcgtcatgagaagaaaatattcccactcctcccagcagctgcagaaaatcagatacaactctgtatccctaaaattctcccggcaagtgttgtttctaacacaggggcctcatggacacttggaccaccctgagagggtaacttcagcctctaaaatcctgtaactcagtttggttgtctaacttaattaataacatttaatttacacctatgacttctgaaagctatgaatactttttatcttttactttgtctgaggcgggggagttcttgctctgtggccaaggctggagtgcagtggtgcgaccataggtcactgcaacctccacctcctgggctcaagcgatcctcccacctcagcctcccaagtagctggaactacaggtacgtgccaccacacccaggtcatttttgtattttttttggtagaaatggggtttcgccatgttgcccaggctggtcttgaactcctgggctcaagtagtccacccacctcagcctcccaaagagctaggattacaggtgtgaggcaccgtacccggcctaggaagattttttaaagaatggctggctctttcctcctttcccacatgcatggggaaaaataataattaaaaaaaaaaacccgagtaataaaaactattattcttctagattcggcatttaagcaataagtttgagaatctatgccttgtttaaattaatcatcctccaaagacttctgaccccaaaatcaggaggtggggcagggcggaggagaggaccagaaactcactggaggtctttaggggcttgggaggcgtggtgggctggtccccgtcttctccttccttctctgtggccacttcagcctctgtgaggctttctttcggggtctcctcttctgacgatagacagaacggtcagatggcaaaaaaatcccattgaacctacaagggcattttgactctggagacagtctgccctcatctgtcatctgttcttttttttgagacagagtttcgttcttaccgcccaggctggagtgcaatggtgtgatcttggctcactgcaacctctgcctcctgggttcatgcgattctcctgcctcagcctcccgagtagctgggatgacaggcgcccaccaccacatccagctatttttttgtatttttagtagagatgggatttcaccatgttggccaggctggtcttgaactactgacctcaggtgagccacccgccttggcctcccaaagtgcaggtcttacagttctatcttgtgccaatccaatgtgcctgtaaagcagtgggccacgtaagaccctgctccttgtcaaccccaagcaaggcagcgaccttgagggggtccagcccgtttgcctatgtagccgagacataaatggtgtgtctttccttaccaatgattcctttagtgttattcaccccaaaatagaatctgaaagggttaaaaatgcaaatgacagcctgttatagacaaaaataaaaatcttcaaagttaaaaaaaaaatcttacctctagggtcacaatacaaactacaaaaaccaacttgggaaaaatctgccttagtagaaagaggccacccccgccacccctcactggacactgacagtggctaaaagtgtagtttacaataaaatttgtactaaaaattgtcaataagaaatcaaatcttttttttttgagacacagtctccctctgtcgcccaggctagagtgcagtggcacaatctcggctcactgcaacctccacctcccagtttcaagggattctcatgcctcagcctcctgagtagctgggactacaggcgcatgccaccatacccagctaatttttataattttggtagggatggggtttcaccatgttggccaggctggtctccaactcccgacctcaagtgatccacccgcttcggcctcccaaactgctgggagtacaggcgtgagccactgcacctggccaagaaatcagatcttaaccaaatttaaatctgccctggaaaatggaccttttatttgtttgcagaaacaaaaaaccaaatgacgttaaaggctgcaattggtgtaatctcatgcaggccccagatgatcaatcgatcagatctttatggctgttttcggtgggttcaccaacatgcagggaactcactgggcgctgcaagatattttagatttttcaaaggaaacccagcgacacctgctggccagtgtgtgaactactagttcgaggtatttcagttttcagtattaaatcacattccttgcaatgacattgcatctctgcaaagctgggttttcataggttgctgctataaaaatcaagtactgtacaaaaatcaacatagaacaggaaatgacgttggcagttttcaattgaattccactgtttaagatgttacagagtatccaaggcatttcccacaagtaattatggttatttaagaacaaaatacaggctgggcgcagtggctcacgcctgtaatcccagggctttgtgaggccgaggtgggcagatcatgtgagctcaggagttcgagaccagcttggtcaacatagtgaaaccctgtctctactaaaaatacaaaaattagctgggcgtggtggtgtgtctgtaatcccagctactcgggaagctgaggtgggagaatcgcttgagcctgggaggtggagactgcagtgagcccaaactgtgccactgcactgtagcctgagcgacacagtgagactgtctcaaaaaaaaaaaaaaaaaaaaagcacaaatattactttttttccaatgtatgtatagtatctaatagttgtttggacataactacttaatagaactgataaggtattggcctaggagcatcataaaaaaattactaagacatcaagggtgctgtgaactaagaatgtttgggaactgcaactttatggtaaaatttacaaggaaaaggaaatcatttagaggaaaaatagtttccattaaataaatataaaaatagcaaataaaaatgggaaactgtgcctgaattattactaaattaagatgtccaaacaaatatatcccacaatgttttcagaacaaaagttcccatattggtaggtggaattcctggatgcctggacacaggcatcaaatcggcagggtccaaacatcctgagctctcaggcccctgcccttgcagatccaaaacacacacacacacacacacacacacacacacacacacacacacacacacacacctctccttctgggggctcaccttcctcctcctccttcctcttggcttcacacacacacacacacacacacacacacacacacctctccttctgggggctcaccttcctcctcctccttcctcttggcttcacacacacacacacacacacacacacacttctctccttctgggggctcaccttcctcctccttcttcctcttggcttctctgtcctcgtcctcactctgctcttccaggacttcctgaatggtccgtttcgggagctgcttccgagctggggaggcaaagggcttggtgtatctgacctcgctggctcgtgtgctcccatcccggagagctcacacccactgatgtagcctctggaaggctctgggccctctccccttctctgcctgcacacagtcactgccccagtgcaggccgcacccttcaatccctcctgcttcctggctgtgtgaccttgggcaggttacttaatttctctgtgctttgctctctcacgactgcagaatagaaataatccccacgagtaaacaatgatgtaatgtacttggcacagtaccgattccagcaggtcccctgagctccccactgctcccctcagatcttaactgcctccaagtgttccagacagcttccccggaacctcagaagtctggaagtggcagggaataaactagccccaggagaggccctcaccccacgatcggcaggagttggtgtataaataccccagctgcctcgcatctcgggggtcactctggagcatttacaccgttccccagagaatcccacaaaactaagctccagctgcccaacacatagcagacccaacagcacatcctgtgttggctgctcccctgtcctgaatcaccctctgttccctgcacctcctaaacaaaccacttgcacttgaatccctgtttcagagcttcagaacctgcttctaaaagcctctaaactcagatactaacccatgatgaagagctcacacaaaggcagttgtacccatcttcactgttatatctcatgttggccattgcgccacctggtccccggtctcccggcccccagtggctccttcacgtggccccagagggaccttctatcagcatggctggcactgtctctccctgctcaaaacccttccatgactccacattctctgctttatccaggataaagtcttttgatgtctaccccgatcctacctaatctctctccatctgaccttctaacccttcccacaccacatactccaccttcttttatatcactgctaaactggggtgtttccagacacaccaagctgtgtcacccctccaggcctcagcatgtgaggtttgggacatagctcaatgttgctccctctgaacaagatcccctgacacacccccagggccaacctcagcgtccacctggagctcccagcatgccctcagccacactgtgacttccttatggccacctttcattcagggatgaacctgcctccccacctcacagcccttccatggctcccaggacccacagcacgaagcccaggctccttagctgggagtgcaagaccttttgagatccagcccccactctcctctctagctcacctctcaccacgtgctatcctcaaactctccctgcttcccaggtcgcatccgattctccagaaacaaggaagtagatgagaggccccaaacatcccatgctgttcccatctcgaggcctctgcacgtgcccttcttgtctgaaatgcatgcatctgtcctttctcaacatggccaaccccaacccatcttctaagactcggctcagccatcacctcccctgggctgcttgacttctgagctcccagagtaccctgcgtcacccagcatcgtccgatggaaagatctggcaagccacgtatgtaaccttaaactttcttgcagccacgttaataaaaagggggaaaaaaccaggttgaacttggtttgaagagtctattttgctcaatacatctaaaacagtatgattccaacattctgttttcatgctaggtcttcaaaatccaatgaactcactgcacatctcaagttggacaccagattttcatcggcaacatgatctgtgtaggtttcataaaatgtacagctattcacataccaaagctgttccaaaatgatgtggaaaaagtgcaaagtctttacgcactgaatcacatattagctttcaaatgtaaattcaactgaaaggatctaacatgaaagattcagctcccctgtcacactcaccacgctaaagcgctcaataggctagaccggacggcaagggctcacactgccccgcattacgaatgggtctctcgccctgttcttaccccacagcaaacattccaagtcccccttaggacaaagacgctgttccccaagctggttttccaggaccttctcacctcattgctcaccatccccaatcctgcgctctacacgccagcacaccaggccctcagcagcccccaggccttctcaatttctatgttccccttgcctagcatgctcccctcctcctttgcttgttgcctcttctttgtcctaaagggctcagcttggttagcctctcttctggaagtctcccttgagccatggccccgcgcttgtgttcccacatgagctgtgaggcctccatctcagcgcataactacagtcacaatgacccacaatgactgagccccgactgagggctgggcccagttctgagcagcgtacacgtgttatcttctaactcagatatttctgtgcggtaggtgctatcattatcatcatctctacagataaagcaacctaagctcagagaaggtcagtcatttgtcccaggtcatacagccagtggatggtggacccgtgctcttaaccacaacactaagaccagagctgttgtaaggat[226 bp omitted]aaggcaggagaatcgtttgaacccgggaggcggaggtcagtgagccgagatcatgccactgcactccagcctaggcaacagagcgagactatgtctcaaaaaaaaaaaaaaaaaaaaaaaagagaaaaagaaaggcaggcgactgaaggggcaggggcccgtgtgttctcacctgtgcgacgcttcggaatccctgatggggaactgtccatgggagaggtgtcagagagggaagcattgttctcaggagatgtggcaggacggggcggggagacctgtgagcagtccagggcaggcttctggaagaggaaagaacagttctagagtgagcgggggaaggagggactccattttccaaaagttgagagtagaggggactgaaacctctctgtctaccctcctttctgaccctatggtctcagccctaactcaggggtggcctcttctcacctgggccatcatcccgccctccagtgcaggatcatggtcccatcaaggacccccatagctcttctgttttctacagtaacagaatcttcgattctcctgcttc[132 bp omitted]t[135 bp omitted]gcctcccgagcaactgggataacaggcgcccgccaccacgcccagctaatttttgtattttttttatagagatggggcttcaccacgttggccaggctggtctcgaactcctgagctcaagcgatcctcccgccttggcctccagagcactgagaatacaggcgtgagcccccgtgcccagccttctctccatacagtttagatgtttgttccctccagatcgcatgttgcaatttggtctccaatgttggaggtatgacctggcgggaggcattcaggtcacgtgggcagatccctcatgaatggcttgtaccctccttgtggtaggaaccgagttcttcctctcctggttcacatgagagctggttgtttaaaattcctctcttgccatgtgacacacctgctcctccttcaccttccaccatgactggaagcatcctgaggctctcaccagaagcagatgctggcactatacttcttgtatagcctgcaggaccgtgggccaaaataaacctcttttctttataaattaactggtctgaagtattcctttatagcaatgcaaaatggactaacatgcatttcctggttcaaataacatccacttaatgttgagtggggtgccctcctcttcctgttggcagaatatggatgttcacagggacaagggcatctacagagagcaaacgacagcacagaggaagcctgggcctctgaccctgtgagacggtcacatgaatcccggactctgcactcaggagagagaaaaataagtttgcgtcttgcctaagccactgctaccgtgtctcggtttcaaccactcacttatcttcttacagggccctgtgccagttattaagtgattttctctcagctccaaacctgtcactgtccagtctccttcatgctgccaggaccgggactccacaaatcttcttcttgctctggcgccacctgggcatcaggcagtgccaatggagggaagcagagggcactgcatgactggaggcacagccggcttgccgggggcagctgctggatcccactgacagttttttctaacattcacggggcttgccacgtggtacctgatcagagaccctggcatctcccacccagtgctcccttcctgaaagatcagagttgcaggctctcggggcaccttctctaagctcagagacctgccagcagtcccaccacagaggtgtgaatttcagctcaaaagccacagggatggtcactgcaccccacagttgctacctccatgatgccttagagttagttctctttttagcccttcagttacctatttaacaactgcatacctagtgaccatcctttaaactccctctgttcaaatcactggtatggtttctgtctcccattgagaccctgatggagatacaggtctcagataatttttttttttttttgagatggagtcttgccctgttgttcaggctggagtgcaatggcacgatctcggctcaccacaacctccatctcccaggttcaagcaattctcctgcctcagcctcccaagtagctgggactacaggcccgtgccaccatgcccggctaacttttgtagcagagatgaggtttcactatgttggcctggctgctctcgaacttctgacctcgtgatccacccgccttggcctcccaaagtgttgggattacaggcgtgagccatcatgcctggccagatgaatattttaaacactgcccaggactaaatgatctctgcctctcttctgcccaaaactcttcctagctccccagaagcctcagggtaaagtctaagctccaaaagagatctctattctaatacctggaacctgggaatatgttaggttacatggcaaagggtaattgaggttgctaatcagctgaccttccgatagtgggattaccctggactatccaggtgggcctgatatagtcacaggggccttcaaagtggaagagggtggcaggagaggaaagtcagggtgagatgtggccacagaagaaaggcacagaaggaggcaatgccacttgcttatttatttatttatttatttattttttgagacagagtcttgctctgtcacccaggctggagtgcagtggcacgatcttggctcactgcaagctccgcctcccgggttcacgccattctcctgcctcatcctcccgagtagctgggactacaggcgcccgccaccacgcccagctaattttttgtatttttgatagagacatggtt[143 bp omitted]ggaaaaggcaattcctggattctcccccagagcccccagaaatgaacgcagacctgctgacaccttgagtttagcccagtgcaacccatttgagactcacgactcccaaactgtaagacaataaactgacactgttttaagccactgcgtttgtggtcaattgttatggcagcaaatgggaagctaacataggtggtgaggaaagtttcgctgaggaagtgatatctgagcaaagcatggaagaaagcaggggactgagccaggcgtgtatctgggaaagagagttttaggctgggaaagaaggtagtggcccagaggtggaagtgcacctggtgggtgtgggaagccaggatggagcgagctgaggaggagctgtggatgcggctgcagatgtgatgggcgggggaagagaggagcagcaggaggggcctgggaggtttccacaaggcctggctttggcctgtggtggtaataccagggggtttgggcagggagtcacaggacctgacctcaccactgacagaataagcagcaccacgctttggacatcatccacaaagcaatgaacaagcattaaatgacttaaacaggggaagagagtggtccaatgtatttggagaagttaaaaagccctctgaccacaggagaggctagatatacttttgaacccttatttttttgcttttttttttttgaagcaaggtcttgctctgtcaccccggctggagtacagtggtacaatcacagttcactgcagccttgaacacccgggctcaagcgatcctcctgcctcagcctctcaaggagatagcaccacaggcatgcaccaccacacctggctaatttttaaaacatttttttgtagagatggggtctcgctatgttgcccagcctggtctcgaactcctggcctcaagtgatcctcccacgttggcctcccaacgtgctgggattacagacgtaagccattgtgctgggccttgagcccttgttttaccatcaggcattattctcagatctgtatgtaaatcgactcatttcatcttcccagtcaccctatgaggaaggtgttaccaggagctgcatgttacagttgaggcatccaagacctaacgtggtgaaggagcccacccgaggtcctagggcaggggcaattaggaccaggttgtgtctgcccccgacacaaccaggaaacacatctacctctcccgggcaatttctccagaattctcctgaacagctgctgcactctgttccaaaggttaatgggaattagtttcttctggtaaaaatgggcagggtgatggggacctacctggcctttagcagggctaagggcttcatcctcctcttccccttcgctgcccaggacccgggccgccttcctccctggcctcttcaccggagagtcactctcggacaccactccattccactccttcagtgccgccctggaaggtggggaaatgggggtgtaaaggggcgactacagcaggcagagtgggggcactgcccgcaaacactttggtttctttgctgtttccttcccttcctttcaagcatccaatgaacattttctggttgtctcctcagcaaatctcatcatttcatccatcagtgcattaatccacccgcccactcatccactcacccacccatcacacatctctggaagtctccagagtgcctgccctgtgatgggtgatgctgaggagcaaatggagtccctgcctaaggttgccattggtctccagcatctattgggatgcctttttttttttttttttgagatggaatcttgctctgtcgcccaggctggagtgcagtgggccgagatcacaccattgcactccagcctgggtgagagtgagactccatttcaaaaaaaaaagagtactgttgtcttctacttagatgagacagcatcaagacgtggccagtggccagcggccagcttctctgcattatggagaatgtctggttctagaacgaggccaagacctgcagaaacagagacgtacagacaactccgaggccctggatccagctgtgcctgcagctgctcttgctcttggacttctggccacctggctgaaaaagttttttgggccccaagacattttgcattaggtttgaacacttgcaaccaagacaatcctgactgctaaaggaaaaaattcaccatatcccagccctgtgacatactttggagggggctccgtctctctgctgctattggatgcctccttctcaggcttctttgctttaccctctttcttggggtggaaaaatgacctagaggagcataaaagggggtaaaaaaagga[138 bp omitted]ctcctgggtgcatgccattctcctgcctcagcctcccaagtagctggaactacaggcacccgccaccatgcccagctaattttttgtatttttagtagagatggggtatcaccgtgttagccaggatggtctcgatctcctgaccttgtgatctgcttggcctcccaatgtgctgggattacaggcataagccaccgcgcccggccgcatcctataacttctaacaccatttccatctcagcacataacagagaatttcaaataagccctttaacttaactgataaggaaactcagactcagacaaaggaggcaacactaatttttctgccctaacgcacctgcaagatatgatacatcccaagttttattcaacaaatattaactatgcactttttaaatcttttttttttagacagactctcgctctgttgcccaggctagagtgcaatggtgtgatctcggctcactgcaacttctgcctcccaggttcaagcgattctcctgcctcagcctcccgagtagctgggattacaggtgcccaccacaacgcccagctaattttttttgtatttttggtagacacgggttttctccatgttggccaggccagtctcaaactcctgaccttaggtgatccacccaccctggcctcccaaagtgttgggattacaggcatgtgcccccgcgcccagcctaaaaaaatttttttttttgagatggagttttcactcttgttgcccaagggtggagtgcaatggtgcaatctcggctcactgcaacctcggcctcccagtttcaagtgtttctcctgcctcagcctcctgagtagctgagattacaggtggccgccaccacgcccggctaatttttttcatttagtagagaaggggtttcaccatgttggtcaggctggtctcgaactcctgatctcaggtgatcctcctgcctcccaaagtgctgggattacaggtgtgagccactgcgcccggcctacctaagcacttattatgtgccagggcctgttctgggcctgaggggtttggcagtgacccagacacacgaagttcctgccttcaagaagctaacactctggtgaagggcagaaatattaagcaaacaactaaatataaaatgttggggcctggcatggtggctcacacctgtaatcccaacactttgggaggccgaggtgggcggatcacgaggtcaggagatcaagaccatcctggctaacacggtgaaaccctgcttctactaaaaatacaaaaaaaattagctgggtgtggtggcaggcgcctgtagtcccagctactcaggaggc[170 bp omitted]aaagtatggagttcagttaagagtaatgtactgacattagtatctcagtggtgagaaacggatcatagtaatgtatgatattgacaatggaaactggccaagggtatacaggacctctctgtactgtctttgcaactttcctgtacctctaaaattattccagaataagaggtttatttaatcttcaaaaagaaaaggaaaaatcatgcaaaagccagtggacagaaagcaatcgaaggcaccatcagccctggagagacaatccccagattcctcatcacgggagaaaaacggaacccagcatttgtgtaagccactaccgcccaggtttctgggatggatgcccttgtctgggtctctctaccatccattttttcctcctggtaacagcccctccgttttcctcttgggatgcttcttaccccacattctctcagtacacacgatttgagtgggctggcccttttgcctgtgaccaggggtggacacgtgatccaggctgcatccctgtggctggttcagggataggtatgtggcccaggctgggccagtgaaactgggctctaacaccctctttccaaggggaccgctaagaggggagagcccgcctgagggtgaggacaacctcaaggacagtagagctgaacaatggagagagacagattcccagggaggaagttttggcaactggatcgaaccaagcctgaggctgtttactccagcaggtttcaatgatataagtcaagtcatgccctttcttgtcttcctgaagccggactgcattaacacgaggtttctcaacctagacactattgacatgttgggcctgatggttctgtgttgttgggggggctgtcctatgaattgaaggatgtttagcagcatgcctggcttttagccactagatgccaatggcaaaccctctgtccctaggttgtaacaaccaaaaatatctccagacactggccgggcgccgtggctcacgcctgaaatcccagcactctgggagg[135 bp omitted]gaggcaggagaatcacttgaactcatgaggcggaggttgcagtgagccgagattgcgccactgtactccagcctgggtgacagagcaagactccaactcaaaaaaaaaaaatctccagacgctgccagatgttccctggggagcaaaattgctgctgactgagaaccactgcgttagggtttctgctccttgcaactaaaaactgttgttcaatacactgtcttccatatcccacggctcattttccatactacttgactcctggaaattccaactcaaaatctaacgtaagagtttttgtttgtttgtttgtttttttaagtacagatttagagaaagaaacagaggacttggagaaggaaagactcaggggcaagggagggtgctcacatgatacttcgctgcatgttggcgtcagaattctcccttcctgtccagcacttttcttcgtctgtcagctgctcctggaacagaaatccaaacacttgttgaggtgattggttgtgcagagatctaaacacacataaaaccctttctttaagaaagaaagaaaaaaaaaaacagaaacatgaatttccccttcaaaaagaaactcctgtttttatgaaccaaaataatttgctggtgagatttactggtgcagaataaaagctccaaatcagagaaaaagataagaggcctcctttaccataagaagactgtttttcatctaatatgaggaatagactgaggacctgaaatgggtttttttggagttaagtttaaaggttagtgaaaaattgttttaaggtgatgacataattccgtgaaacaactgtggaagcttataaaattgtacccgctggtctacataaattagctcttgggcagtttctaaggtatgctgttatttcaaacaaagggcagaatatcacagagtgtgtgctactgaactgtgtaaaagagaaaggctataggtcaggcacagtagctcacgcctgtcatcccagcactttgggaggccgaggtgggtggatcacttgaggtcaggagttcaagaccagcctggctaacatggcaaaaccctgtctctactaaaaatacaaaaattagccaggtgcggtggcacgcgcctgtattcccagctactctggaggctgaggcaggagaatcgcttgaacccgggaggtagaggctgcagtgacccgagattgtgctactgcactccagcctggacaagagtgaaactccatctcaaaaaacaaaaacaaaagaaagactataaatgtatccacatatcttgtatatgtacagaacatctcagttggaagacaaaaaactggtaatgctgtcgcctcaggagggacagacgctggagggagattttttaatatgcatgcttttgcaggcagaacaattggaatacgttaccccttcacaatatatttttaaaaattaaatacttttttaaaaagtctgttatttaatgaaatcaataacagtcactggggcttccacagtttagagtaactctaatgaaagggttcctaggccgggcgtggtggctgctgcccataatcccagcattttgggaggccgaagcgggtggatcgcctgaggtcaggagttcgagaccagcctggccagcatggtgaaacctcatctctactaaaaatacaaaaattagccaggtatggtggtgcacacctgtaatcccagctagtggggaggctgaggcaggagaatcacttgaacccaggaagtggaggttgcagtgagatcatgcactctagcctgggcaacagagtaacactctgtctcaaaaaaaaaaaaaaagaaagaaaaagaaagaaaaagaaaaagaaaagaaagggttcttaatctggggtccacaaaacccaggagtccaagagcagaactcaagtggtctatgaaatttgacaggaaagaaattacgactttattcttgtaaacttctaattggaactgagcctttccttccattataaatattaaagatataaaaaattataaattttctatatctttaatatttataatggaagaaaataaattacacattataattatgtaattataattatttacattatatttccttccactatgaatatattttttaaaaaaggactagcaggacctctgcgtggattgcttgagttgagaccagctcagaccagcctgggcaacagaaatggttttctttgactttcccttcctttgcacagaaatcttcttcaacccatggggtcccctttcgttttctggaatcagtactctctgtcccgcaccacacgcctctaagtctccactactctctacagccttggccgccacatgttggcaccacaactcaaactcaattttggaatcaaaaaactcagtaggccggcactgtggctcacgcctgtactcccagcactttggaaggctgagacaggcggatcacgaggtcaggagttcaagaccagcctggcccgcatggtgaaaccccatctctactaaaaatgcaaaaaattagccaggcatggtggtgccagcctgtaatcccaactactcaggaggctgaggcaggagaatcacttgatcccaggaggcagaggttgcagtgagctgagactgcaccactggactccagcctgggcgacagagcgagaccccgtcttaaaaaaaaaaaaaaaaaaaaaaaaacaaacaaaaaagaaactcagcaatttccaaacagagtttctcagggccagttggggagcaggaagtaagcaatgcttcaaccaaacagttcacacagaaagcaggttagggacttagccaccaaaatcctgagggcaaaggagaaaactattacgatccctcctgagtgctcaactgcctaggtacttgacattctcaattatactgactctccacaacaactctgttacagaaactaaggcacagaggggttttcaaaggaacttaacctgcatctatagtacgttccaccccaggtcggcctgctccacagctcacctcttaaccaccagactgagttgcaagggaaggagaaatacataagcgtttactgggaagcctactctatgcctgacaggctgatcacattctcaaataccctcaatcctcaagtcagccctccaagacaggtgagatcatccccactttatagatgaaggtaatgaggacagaggaacatagctggggttcaggcaaggcttcaaaacccggtgtggctggctccaaagcccacgttcctttctccttaccacggtactcaaggctggcttctcaactctgtgtactgctgagttggggggaacaaactggttgatgcctctggaggaccacctggcgtctctatcggaacggcaaccccacttctgtgtatttggcccacagagaccctcacaggtggaccaagtgaggcacaaagttacctgctgcagcactaactgtaatgagagaagactggaaactggtggaatgtctacccttagggaactggttccctcattactggaataccatatggtagaatattgttcagggttaaaattaaatgaatgatggataaaaggtataggagttttttggggggatgataaaaatatcctaaaatcgattatggtaataactgcacaactcagcgcatacactgaaaaccactgacttgtacactttaaatgggcactttaaatacactgaaatacactttaaatacactgaaaaccgctgacttgtacattttaaatgggcaaaattgtacactttaaatgggcaaactgtataattgtgaattatatctcaataaagcggttaccaaaatgaagagataatgacaggaaaaatatcaagtaaggatgaaacagtactcagtaataaaaagaaacgaagcactgatacaagcaacaacttgggtggacctccagggcattgtgcagagtagaaaaaaggtaacatcctaataatatatgattccatttacataacaatctccgaatgacaaaactagagatggtgaacacattagcggttgccaggggcctggggaggagttcttatgtggagagggaactgttctatatcacaattacgatgggggttacacaaatctatacaaggaatcaagctgcacgggcacacagatgcacaatcacactcacaccacacaaactggtgaaaactgaacaaggtctgtaatctagttaacagaactgtattgatgtcaatttcctggtttcgatattgggactacataagatgtcaccattaggggaagatggatatactcttttcacaacttccttgaatctataattatttcaaaataaaaagtaaaaacaagaggtaagctccatccctttatcaagcatacattaggccagacgtctccccattcagatgattctccatcttttacgagccctttacctagacctggaccttaccactgacctctccctgacaccacccatctccctccagtagggcccactccttccaggtgatgctgctgcccgcgatttaccttcttctagccccgccccctcagcacttccaggtggcccccgccccctcagcacttccggttcccagccagccccacccttggcacctcccccttccaggtggccccgcccacacgcaatcttttccccggccccgccccttagctcccttcagcccctccccctcccagatagccccgccccctcggggggccttccgatttccagctggccccgcccacacagttttcccccccccggccccgcccctcagttccatttggcctctcccctttccaggtgaactcgcacctcaaggcctcttctcagaggacctgtccaactgtctctgtctctcgtctaccctctacctggcccccctccctctgggagacacctctctgcactctccggcggcccgcagcccgcgctcttccgtctccaccgcgctctcggcagcctcagcgtccccacgcccactcctctgcagacaccccgacatggcgaagcataggccccaagcattcggcgcacccgccgccctccgcctcccatctgcttgcggacggccccacttgccttgcgttggtcccgcgcgccgctgcccgggcaacacactcagatccgccaggcgcgcctctgcagtcccaagttcgcgccacggcattcgcgcgcagacgtctgcgggcgggggcggggcagagcctaggggcgggacctgggcaccgtccgcaccgccgccgtcgcgcggaggacactgggagtcgtagtctcccgaatgggaggagggcgggaaaaggggtgaagtggggcgagccctcccgcagagcacactgggaaaatgcccgcgctttccctcgccctggatgagcgggtgtggctgagggtctgaggagtgactggcagggaaagaggaggaatcggtggaagcgcccccgcgaggcacggcgggaagagaggcgggagaccgcgcggggcatcccgggagcaagggccgggccaggcctgggcgcggggcattgtgggaggtggacgccgctccggggcgggtaggtgagtggggaggggcgggaagggtgcacatcttggggaggggagaggcacagctaggtgggacggcggggctggaaggtgccgcagcgggcggggagggggggagtaggagggtcgggagcgggctggatggggctgctcgaggggagacgcgcagctggacgtggggggagcatctggggtgaaggagcccatccgaggacgaggggccatgtctagaacgaagatgcatattgcgggggatggtggatgtaactgggaggaggggcccacagctggactgggggccgcatctgaggaggaggggaccacaggtgaatactggtgacacttccgaggagaactagccacaagtggggcacacacctgtaggcgaagcgtggataactgcatgtggggagtacatctggagatgagagtgtctcagggaagccccagctacagctgcatgtggcgagccatagggtcataatcgggggaaggggcaacagctgcacgccagaggcacatctggggagtgcggagccacaggtgcatgaagcatgtgaccgggtgaggggtccgtggcctggatgtgggagcacatctggagatggagcgtctttggaggggttacagccaactgttggcacatggaaggaggagttccagatgaatacgagagttagaagttactcttgggtgagagacacagctggaaggggaggaggttttagctggaatttgagaacacatttgaggagatgtccttaagggacatctgagcttaagggtcgtattttgggaggagagattccaactgtacctaagggtcacatctgcggaggaggagacgagttggaattaggaatcaagatgacaggctccaagtgaaccagggataaggcggtgggaggaggccaaagataggatggaggttgatatttatatatttggagaaaaacaggcacgtccgaccccgggctacccacctcgatagaggcaccagcaaccgacggggcaggccaagaatggagtagatgagataccccgggtgggaatgggtctgatatccacctgttctcccctcctccacgcaggcccccaggatggagcggccggagcccccacccggcacggctgcggggcaggaggagcaggagctgcgggagcgggccttcttctcgtgggccgagttcagccgcttcttcgacgcgtggtgccagcagcggctggcgctcttcttcgtcaagagctccatgcacctggcgcgctgccgctgggccagtgcgcccccgctctacacgctcatcgacgtgctcaagtacagctacgtgcggcttgtgtgcaaggacgtgcgtgcgcccagccggcccgccgtggggtgcgtgaacctgagccgctgtcctgctggggggaaggggagcaccgggggtgggtgtgggtgggagacgggcagagaacaccccacccagagatgcagagggggagaggccaactgaggcagccaaatacaccttgcagagaggcgggagtcaaggagggacatgtactgagagaagaagaggagctagagagacaaagatactcacggagcaagagatggtgtgggcccgacttacagacttttttttttttttcgagatggagtctcgctctgtcgcccaggcttgagtgcagtggtgccatctgcagcctccacctcctaggttcaagtgattctcccgcctcagcctcccgagtagctaggactacaggcacctgccatcatgcccggctaatttttgtgtggttttttgtttttgtttttgttttgttttgctttgtgttgtttttttgagacagagtcttgctctgtcactcaggctggagtgcaatggcacaatctcggctcactgcaacctccacctcccgagttcaagcgttgtttctcctgcctcaacctcctgagtagctgggattacaggcacgcgccaccacgcctggccaatttttggatttttgtagagatggggtttcaccatgttggccaggctggtctcaaactcatgacctcaggtgatctgcccgtcttgcctcccaaagtgctgggattacagccgcgagccactgtgcccggcctgacttacagaatgtaatagagacttcgagaggcagagcgtaaaacacacacaccccaagaggagaaaatagtcacggaaaattccagaaacatggagacatggaggcagagacaccagagacagccagggaaacagaagagccaggttttgtacacgtgacaaagactgggagacagagactgggagactgaactgcagagaagccgcaggataaagaaaaggatccatctattcagtgaataaggggccaggtcccatgctgtgggctggggatattctagttggagcgatggagttgggcaagagacaaaaatccctgcccttctggtactttctgactggacagaaagattgacgttaaaagaacaagctcacaggtagttccctacaactgtgcaaagaggggcaggtgagaaatccaggagagccagaatcacacccaggtggccaggggtattttaatggaccccaattgtattttatttagtctttatttttttgagacagggtcttactctgttgcccaggctggagagcagtagtgcgatcttggctccctgcaacctccaactcctgggttcaagagattcccccacctcagcctcccaagtagctgggactacaggtgtgtgccactatgcccacctaatttttgtatttgtagtagagatggggtgtcaccatgttggccaggctggtctcgaactcctgacctcaaggaggctgaggtgatctgcccacctcggcctcccagaatgctgggattacaggcatgagccaccacacccagccaaattgaccccaattttattttactttattttattttattttatttgagacggagtcttgctctgccatccacactggagtgcagtggcacaatctccactcactgcaacctcagcctcctgggctcaagcaattctcctgccttagcctccccagtagctgggattacaggcatgcgccaccatgcccagctaatttttgtatttttagggtttcaccatgttggccaggctggtcttgaactcccgacctcaggtgatctgcctgccttggcctcccaaagtgctgggattacaggtgtgagccacggtgcctggtctgaccccagttttaaacaggggttgttccccacacagttaggtttccagcttccactggaacaccggaagaggtgagcccatgtttccattggcagacggccacccctcttggatggggctttgctgcccaggtttgccccaaaccctgccactctctgctgcctcatccctagcactgtcttttgcttgttttgcctgcctggtcccagtaggtgtgtgagtttgagacccttggttggggagctgtagacaagaacagagtgcttaagaacacaggctctgcctttaggctgcctgagacatgctccacgacttcctggatgggtgactttgggcaatggacttcacatctccaagcctcagttttctcatcctttgaaatggggttatcacgatacccgcctcatggggccattgtgaggatactgtgagatcatacatgagaaaaacacataaccctggtgcctggaacatggggtggctggttaagtgatagctgttacaggattcgagagcatggactctgggccattgtgctgctgatgcttggtggatgctgttgagtgagtgacttcacctttctgtggcctcagtttcctcatgtggaaaatgggagacataatagtgtctatctcataggtaaattattcagaaaggcatccagcacagagtaagcacactcttaacagctctttcaccggtagttatttaaacatgtattgtgaaatacattcttgcaacttctttctcactacttattctagaaacagagactcggagatctgaaagtggaacagcatcaaacacacacatcacccagaaacctagaacgttagagcttgcaagaagctcaaagaagctcaggcctaatctgaaacctattaacagaacccagttccaatgtaacaaatgcttattgagcacctactatgtgcatgcccttcactggacgtttagaatccgagactgatctcggctcttgaacagttcagaacttaatggggtagacaaagaccaaaaaacaaaaaaaaattatagatagtggcccatagtagtgagagtgagattgagggggagatgagaggaggatacaaagggagtggtcagctccacctgaaagcttactgggtggttctggaaggcttcctggaagaggtaaccagtaagcagaaccttgaagaattttgttgatatgtttatgtatgtatagtatgtgagctaacagacacactaggtttactatgtgcaggtactgtcccaagtgctctacaaatatcagagacagccaaggagcaggagagacaggactatggagggggcgaggacagggccctgggtacactcctgggactgggtagatgatgagatggtctctgaatggggagtgcgggagcaggtggttgatgagccggttcaggaacgatatcttggagccgtcatgtctagctccctcactctctcgagctgctcaaagcagagcctctccagtgccacagcccagggacagcccatgggccgaggtcaggctggagaagttagtgtgtaaggaaaggcaggacatgaggctgcagtggtgtcaagggctggatctggcagggctgagtacaggagttgggactttatctgggggtggtgggagccctagaaggctgtgagtagggtcagttctgggtggaggaagatccctctggggccgtgtgggagacgatgtgggggagagagaagggatatgaaggaggaggctggggctgagggtgcaaggaaccagacaagaactttcttcctgtccactccttcccccttgccagaggttacacagtgactctcttgaagtcaccactgctgcagcttcagctctccagctccagttcctcccccatccctctctctcagcacttccctccctggaacagaattgctcagcctttctcaatacacaccggccgttgaaaacataaagatcttgaaaacctgaacgatcaagaataaatgggtagtcgggtgcggtggctctcgcctgtaatcccaacactttgggaggccgaggcgggcagatcacttgaagtcaggagtttgagaccagcctggccaacagggtgaaaccctgtctgtactaaaaatacaaaaattagccgggcctggtggcaggtgcctgtaatcccagctactcgggaagctgaggcaggagaatcacttgaacccaggaggcgaaggttgcagtgagctaagattgtgccactgcattccagcctgggcaacagagcgagactctatctcaaaaaaatgaataaatgggtaagtggaaggcaaatcaaagcaaagcaacgggtccttgaaaaaaagtttaaaaaaatagcaggtactatttctgcattgtttactatgcactagcccatttctaaccactttacataatttaatcctcttatttagccctctctacaagcctgagagactagtattactattggccccactttccaggtgagaaaactgaggcacagaatgcttaaagattgttcccaggataacacagcagctaagagggaaaaccagggtctggaccctcattctggttactaagcccatgattttaattaccaccctcccgcctttctttctcactttctctttctctctccttccctcatctttatttcaatcattcaaccctcagtgtgagggttgaccgtgccatggatcccctaaagatgtgttgtttctgggcaccagcctatccatcccttcacccaagaggtttttgggagcccctgcaatgtgcaaggtggtggttttagatgctgggatttctgtggggagcgtacattacagatggacataaataaaaatcccagccgggtgcggtggctcacacctgtaatcctagcactttgggaggccgaggtgggtggattgcctgagctcaggagtttgagaccagcctgggcaacatggtgaaactccgtctctactaaaataaaaattaaaaaaaaaaaattagctgggtgtggcggcgtgtacctgtaatctcagctattcaggaggctgaggcaggagaattgcttgatcctgggaggcggaggttgcagtgagccaagattgtgccactggggacagagtgagactccgtctccaaaaaaataaataaataaaaattaaaaaaaaataaaattccctacatgtgatggaccatgccctagccaggatatggtcagggaagacttcctggaggaggcgatgctggctgtgaggcctgaaagatgagtaggagttgactaggtgaaaagggagaggaatgttttatgaaggagggaagaacttacgataggttgtggcaatggaaaaaatgtggatgggtaggacgtggtgatggatggttttggtggaatggagaccatatcccagagtaggtgtgccagggtttgtaggttacatcgtgggatttagtcactgaatcatcacacacttactgaatacctccagacgccaggtactattctaggtgctgaggatacagagataaacaaaatagacaaaaattcctatccatgtggaatttacatttagcggggggatgacattattcctccagacaggtggagagaaattggaaaaatggcgtgttgaagcaccagtaggtggttatgtgagattctgggcccctgcagaggagatgccctattctctggcaagattcatggcttcacagaagaggtgacctacccggagcaaggggctgtcctagggcctgaaacacctaggctgaaggaagtcagacaagggtttcacaaaagcccacgaattattctagaaaaatgtacggggtggcataccgtgaacttgcaatcttgataaatcaaacatggctgcacgcggggatttcctttgcttccacctgataccacatggtggctgtatgtttattttattcatatttatttgtacattgaataattttctaaatgtgcattatttttgtattttttgagatggagcttcgctcttgtcgcccaggctggagtgcaatggtgtagtctcagctcactacaacctccatctcccaggttcaagcgattctcctggctcagcctcctgagtagctgggattacaggtgcccgccaccacgctcagctaatttttgtatttttagtagagatggggtttgcctatgttggccaggctggtctcgaactcctgacctcaagtgatccgcccgccttggcctcccaaagtgctgggattataggcgtgagccaccgtgcccggccttgttactttaaatgaggcataaagtctcaaactctgtatgttgattcttaaaatctagcaggctcctgcgtttttcttcacctcgtgcatgtaggaaaaaaggggtgtgtcaaggatgcccttctggtttaacaaagaaaatttttaagcatttatactggtggatttaagcatttctctgggtggatcctggggagaatcacccagttggggggccatttggaaaaagcataggagggcttttagggggtgtgttactggggtatttactacctgggagccagggtttcttaactacataccaggccccgggcagtctgtgttacaagggtcagcaaactagg[152 bp omitted]cctcctgagtagctgggactatgggcgtgtgccaccgcacctggctaatttttgtatttttagtagagacagggtttccccacgttggtcagactggtctcgaactcttgacctcgtgatctggccacctcagcctcccaaagtgctagaattacaggcgtcagccaccacgcccagcctgtagcctatttttataaatgaagttttattggaacatagccatgcctggtcatttacatacgtctatggcttcgtttgcaatatagcaacagaatatattaaacatttactacctggccctttgcagaaaatgtttgacagctcctgctgtataaacataaaatctgccaaaaaatgctgatattaccccacatggagaaacactgaacccctcttcagaaatcagatgccaatttaaatattactatcagagaaatacactctgatttttttttcctattccctttcttttattttcttttttgagacaaggtcttgctccgttgcccaggctggaatatgatggtgccatcatagctcactataacctcggattcctgggctcaagtgatcctcttgcctcagcctcccagaatagctaggactatgggtgtgtgccacaatgcctgactacttttttatgttttaattttttgtagagaagggctcttgctatgttgcccaggctggtcttgaactcctggactcaggtgaagtgatcctcctgcctcagcctcccaaagtgctgggatgacaggtgctagccactgcacccggccctatttcattttctacagtgttggttgcaactctctacattaatttcatgtaatgggctatgctgtgcagtctgagaaccgctgtcctagacaaactcttgctcacacacataaagagatgtataagagagtgttgtatcacacgttggggtgattgaagcatcattcgtaacagaggagaactggaaacaccatcatagatggcagagccgtggagtggaacattcggcagcagtaaaaggaatgaaactgaacagttttgaaaatccgagtgaaaagccagctgcaaaggcatctgtaaggtgggatgattgtcttagtctcaattgatgtaacaaactaccacaaatatggtggcttaaaacaataccaatttatttatctcacagttctggaggtcaggcggccaatatgggtctcagggctaaaatcaagacattggcagtgctgtgttctggaggctctaaggagaatctgcttccttatccttccagcttctagagaccacccatgctctttggcttggagcctcttcctccatttgttttatttatttattctagacggagttttgctcctgttgcccaggctggagtgcagtggtgcgatctcggctcaccgcaacgtccgcctcctgggttcaagcgattctcctgcctcagcctcccaagtagctgggattacaggcatgcaccaccacgcctggctaattttgtatttttagtagagaccgcgtttctccatgttggtcaggctggtcttgaattcccaacctcaggtgatccgcccacctcggcctcccagagttctgggattacaggcatgagccaccgcgccaggccattcttccaattttttttttttttttgagaggtaggggtctcactagtctcactatgttgcccaggctgaactcaaatgatcctcccagctcagcctcctgagtaactgggactataagcaagtgccactgtgcctggctcttcctccatctttaaagctagaaggtagcatctttcaatctctctctgactttgatcctcttacttccctctttcccttataagaacctttgtgatgacatttgggcctacctgggtaatccagactctccccatctcaagacccttaatttcatcacacccgcaaaggtcctcttgccatggaaggcagcatatgcacagtttcagtgactatgatgtgaatattttggggaaccatgattcttgctaccgcaatgctcggaaacaaagagttttctttttctttttttcttttttctttttttttttttttgctttgagacagggtctcgctctgtcaccccaggctggagtgcagtagtgcgatctcggctcactgcaatctctgcctcccgggttaaagccattctccttcctcagcctcccaagtagctggaattacaggtgtaatcccattagcctattattagccagcacgcctggctaatatatatatatatatatttttttagtagagacagggtttcaccatgt[137 bp omitted]acacacatccagaaaagtacacacatcatatgtgtgaaactgaatgaattttcccaaaaaaaaaatcagaggtaaccagcacccagaacaagaaacagaatatgtccagtcccaagaaacctcctggtgccccctcacagggttaaccacttaagggtaaccactatctagcctcctaacgatagaggttaactttgcctgctgttgaactttatataaatgggaattatatcagtttctctttcatgtctggcttctttcacttggtaggtttgtgagattcatccgtgttgttggaggttgtaatggtgtgttcattcttggtgctgattagtgttttattttaggaatataccacaacttattttctcactctattgttggatatttaggtttcaagtatttggcgaatacacatagtgctgctatgaacattctcgtacacagctttagatgcccatttgtcttgagtggcaccactgggtcacaggagagacataaaatttgctttagtagatactgccatgaagttttccaaagtgcttgtgccatttcacgttcccatcagtgatgggtgagagttccagttgctccacgtcctcatcaacacttgatgttatcagtctcttttgtttgaccattctgctgatgtgtagtggcatttccttagggttttaatttgttatgtctttgatgactaatgagtttgagtcctttttcacgtatacaatgcttttaacacacagaaacatacctcccattgtttatgggtgcataaaaatatacatggaatgctaatagataattttgatagtggctgcctctggggacagagggaaggaagataatctgttagggcagcgttcacagaaggcctcaacttttgatgttattgctaaaccagaagcagatacaggactatctgaaattttttatttctaaaaaaagttaaggtaaatacaataaaacattcactcacttttgacagaactaagggtggtaggtatagaattttagtgaacacttactgcttgccatattccagacactgtgtaggtgctttacctatattaactcttttcatgctcatgacgatcctatgaggaaggtatgatgagtaggaccttccttgtaacctatgaggaaactgaggcatagagacttgaagtgacttgccccaggtcacacagctggcatattcttagggccctctactcttctctatgcctgaaacaattcttagtttaaaaaaaaaaaaaaggtgagtggaaaggaagaagagggcagcagagtgatgtgaccagggcggtggtggttcctcccacaggcctccccagcccggctgccccgccttcatcatcgtcaagctgagcccgctgcgggaccgcctcgtggtgacggagtgccagctgacccactcacacccggcctgcccgctggagttcgcctactacttccgcccgggccacctgctggccaacgcctgcctgccggtgcgcaccaccaacaagatctccaagcagttcgtggccccagccgacgtgcgccgcctgctgtcctactgcaagggccgcgaccacggcgtcctggacgccctgcacgtgctcgagggcctcttccgcaccgaccccgaggccaaggtggggtctcgagagaggcaggccgggggagggggcgggggaaagccgcgctgaagactcgtgggtcattcatgccttcatccgccctctcatcccttcactcctttcctccattcatccgttcattcattcaataagtacttaccgaggcattggggatgcagcagcaaaccagacccacgtggtctctgtccgcagagagcttaccttctagggtagtgctgcccagtagaactttcttccaggatggaaacgttctgtgattctgcacccccagccacaagtggctactgagcacttgaaatgtgtccagtacactgaggaactgaattaattaattaattaattaatttttttgagacggagtctcactctgtcacccaggctggagtgctctatcacccaggctggagtgcagtggtgcgatctgggttcactgcaacctccgcctcccgggttcaagcgattctcctgtc[136 bp omitted]gcctcccaaagtgctaggattacaggcgagagccaccacgcccggcctgaatttattctaattaattgaaatttaaatagccacctatggctattggctgccttgcagaggtaactgccagaacgcccctgcagttctggcgggaaaaaccaacaactgacaaacatgtccaaatatgatgtaacatcactaggggctggctgggtgctagcaagaaggggagccacagtgatgacaaatgctatgtaagttttttttttttaatcttttttttttttgagacaggatctcactgtcacccaggctgagtgcagtggtgcagtcatggctcactgcaccctcgatgtcccaggctcaagcaatcctcccacctcattctcccgagcagctgggacaacaggcgtgcaccaccacacccagctaattttttagtttttgtagagatgtttggcgggggggggtctccctatgttgcccaggctagtcttgaactcccagactgaagcagtcctgcttcggcctcccaaagtgctgggattacaggcatgagccaccacgccaggcctacttaaatttttttttttttaattgaactgcacaaacagaaaatgcacaaatgataaatacttagtttgatgaatgttctcaaggggagaacacacctgaacccaccatgcagatggagaattaggagaaggaagagtgctatgtcctgtaatgtgatggagcgataagttatcatcaaggagaaaaaggccggggcctggagcgggacagttctaagggtgctgtttgaattggtcagggaaggtctctttagcaaatgatggtgaagcagaggagatggaacagaggcaagggaccctcattctgtcatcagagggaagagaattctaggcagaaggaacagccagtgcaaaggcccagaggcacgagcaagcttgtgttggaggaacagtgaggatggctgctgctccataaggaatctctgcggctttaatccaacttcaagtttggggtgaacttgaagtttaaagaggaaagaaagatgagaaagtaggggaagaactggtttctcctcctggctgtgcctttgtctcccttgtgtgtggaagaggtcccaaggcagggtaaagtcgagattcagctctggcacactcttcctgtcttcatctcatgcccagtaagaagccctgattcaagccaccagcccaagcccaggcctctgtcccgacataataataattttagctaatgtttatcaagcacttactatatgccaggcactaccctaagtgctttacatactataactcattttcatctcacctgagccctatgaggaaatagtccaccattctcatccccattttacagacaaggaaactgaagcacagagaagtcaagtaactggctcaaagtcacacagctatttagtgacagagctgggcttcggacccacacagcctggatccagacccatgaccttcaccatggggacaaacacacatgcacttcctactccactggtctttgctgatctagtaactctcctccactacccaccatgacataaataagcctcagctgttcttccctgaacccaccctctgcaggattgtccctgtgcagaacagctcattcatagatcagagccttccctggaaggggagttgtcttttcattttgaaggctgtcttggaatctcggctaaaccacggttggctcctgcgtctgtgttttgacctgctttcatactttttttttttttttttttgagacggagtttcgctcttgtcacccaggctggagtgcaatggcggaatcttggctcaccgcaacctccgcctcccgggttcaaacgattctcctgcctcagcctcctgagtagctgggattacaggcatgcgccaccatgctaatttttgtgtttttagaagagacggggtttctccatgttggtcaggctggtcttgaactcctgacctcaggtgatccccccgccttggcctcccaaagtgctgggattacaggcatgagccaccgtgcccagccccttaatgctcttgaaagaaaggaggaagaagttctaggacaggagagacagattagtgaagcaacatttaaatatttactttttgaatatgtcatacattcacatggttctaaaaaaggtatgtggtgaaaagtcttatcacatcctgtcccccaggtcccctcccctgcagagttattagcagcttataaatcatatctcgctttctatcctatggaccagcactgcccggtggaactttctacaatgatagaaatgttccttatccaggctaggcatggttactcacacctgtaatcccagcactttgggactctgaggcagatggatcacctgatggcaggagttcgagaccagcatggccaacatggcaaaacctgatctctactaaaaattcaaaattagccaggcatggtggcaggtgcctgtaatctcagctactcgggaggctgaggcacaagaatcgcttgaacccaggaggcagaggttgcagtgagctgagattatgccactgtactctggcctaggtaacagagtgacactcttgtctaaaaaaataaaaagaaagaaaatggttcttatctgtactgtccaatccagaggccactggccacacatggctacagaatgcttaatgaggccagtatgactgaggaactgaatttgtcatttaatttatcgaaatgtaaacaacctaatgtagctagtggcttctggattggacagcgcagctctgcacatatacaggtcaatttgcatgtctgtatgtttaactttaatttttaactttatttcctctttctgccccgccaccccccacccccagcaagcagggcagcctagtgtacacgctgtttttgtttgtttgtttgtttgttctttgagacagggtttcactcctgtcacccaggctggagtgcagtggcacgctgttggctcactataacctccacctcctgggctcaagtgattctcctgcctcagcctcctgagtaactgggactataggcatgcaccaccatgcctggctaatttttgtatttttagtagagacgaggtttcaccatgttggccaagctggtctcaaactcctgacctcaagtgatccactcaccttggcctcctgaagtgctgggattacaggtcggggccaccacacccggcctgtacatgctgttttgcatcttgctttatacgttggggagtgccagatgtcaccatctttcgttcttcctctggggctggtcaaatccccctgagaaaactcctctggcctcctggcggggggtgaaggccaggctgccagggccaggctgccagcttctgggagctgcaggggcagaggcagggagctgtcaggcattcagccagcaagacgcactcagtacccacttggggttcagaatccccctccctcatcttcagatgggccagatgtccccaaagccagcggcccctttctgtttcaccctgtctacagaataaacccccagtcactgggggtgggggaagagtaaggggagaggggaaacgagatttggaggtctagctgctgctgaaacagccctcagttcgtctttattttgccttctgcaaaactggcctggtgttgccagctccttttgaggactttgctaccggttctcagcatccctcaattgctggcttaggattcatgggtttttaggggtggggtgggattagcatgtccagctgctttccagtttccaaagttctgtccctatcatattgcctctgatttaaaaaaaaaaaaaagccattttaaaaaaaagatgtaattgaggttcaagagagagtgaaactagagaggtgttcaatccatcacttttacacagaaatttcacctttttttcacttataaaatctaatgaaagagttctatattattatgttaataatacagtagtaatataacagtataatgtaataattaatatattatattaattatatattataattatatattatattatattatatatattatatattatatattaattatatatattatatatattatatattatattataatatattatattatattatatatattatatattatattattattatattatattatatatattatatataatattatatatattatatattatataatataatattatatattatattaatattataatatgtaacgcataacatgtaatattgataatataataggtgcgatggctcacacctgtaatctcagcactttgggaggccgaagcgagaggatcacttgagcccaggagttcaagaccagcctggccaacataacgagcacctgtctctacaaaaaattaaaaaaaaaaaaattaggcatggtggcatgcatctgtagtcccagctactcaagaggctgaggcacgagggttgcttgagcccaggagcttcaggctgcagtaagctatgatcacaccactgtactccagccttgacaacagagtgagaccctttaaatagatagatagatagatagatagatagatagatagatagatagatagacagacagacagcaagctttaaattttcatcccaagcctaggtcaagcaacaatcagtctttccacttcccagcagtcttccaaaggaaggattatttgtaaaaagtgcctgcacttcctgagttgggttgctctcttgatctttggaggggatcagacaagaaggatgcgcccaaagccacaaggcatgatttaagggcaagactggggggcgacttcacccagggaggtgttaatacctttttttttttttgagatggagtctcgctctgtctcccaggctggagtgcagtggcgcaatcttggctcagcacgacctccatctcccaggttcaggtgattcttgtgcctcagcctcttgagtagctgggactacaggcgtgcgccaccaggcctggctaattttgtgtgtgtgtgttttagtagagatggggtt[148 bp omitted]ggggtccagtcacatctccattccctcacttgtggcaggcaccagggtaaccagcaagcaagccctgaaaagagagaccttgcccggaaacgttgcagcgttctcttacgtgtatgctttgccttctgagaatggcgagcattgatgcaagtgtatcccttttaagaatactcaat[184 bp omitted]gaggcaggagaatggcgtgaacccggaaggcggagcttgcagtgagctgagctcacaccactgtactccagcctgggtgacagagcgagactccatctcaaaaaaaaagaatactccatgggaagctggtatgatctcagtggagggcaatttagcaatatctatcaaaatgacaagaacactcacccttaggctcacaatcccactactggtgatttatcctgcagatgtagttgcacagctgtggaaggacttacttacaaggttaatcattgttgtttgtgaaagcagcagattagaaacaacccagactccaccaacgggtaatggttacataacttgtggtatatccatccatggattactacacagcactaaaaaagaatgagaactttgggaagccgaggcgggcagatcacaaggtcaggagatcaagaccatcctggctcacatggtgaaaccctgtcactactaaaaatacaaaaaattagccaggcatggtggcaggcacctgtagtcccagctactcgggaggctgaggcaggagaatggtgtgaactcaggaggcgtagcttgcagcgagccaagatcgtgctactgcactccagcctgggcgacagagtgagactccatcctaaacaaacaaaaaaaaaagaataagaacaagtctaggaactattttgaaagatctctcaaacacatttttaagttaaaaaagcaaaatgcaaaactgtacataatatgctgtattatctataaaatagagcaaataagaattataggtatgcttacttgtactcatataaagaaactctagaagaataccaagaactgtggatgagggtagaatagtgaatggaaactgactgattagactaaagaggtgggagtaagaccttttatgtatcgctttacattatttgactttaggaccatgtggatgtttgcatattcaaataattaattcttaaaaagaagatgaaaatagaaggtgggcgcagtggctcacacctgtaatcccagcacttcgagaggctgaggtgggtggatcacttgaggtcaagagtttgagaccagcttggccaacatggtgaaaccccgtctctactaaaaatacataaattagccaggcatgctcgtgggtgcctgtagtcccagctactcgggagactgaggcagaagaatcacttaaacctggggtggcggaggtcgcagtgagccgagatcatgccactgtactccagcctgggtgacagattgagactccatctcaaaaaaaaaaaaaagaaagaaaattaagcaatagtcccaacatactaaacgcatttgtttctctcctcaaaggaaaaattagagggcgagttatagagggtcttgaggttgtgtgagtcaggatggcctaggttttgctgtaataatgaacagccctcaaatctcagtggctgaactcattgaattttatttcttgctcacttacacagccaccacgggatgttgggggagtactgtttatctgagtcattctgggacccaggaggatgggcattcagcccaacgtaattaccatatctggcagcggtggctgcgaaggcttctccttggatgcgatgccgcagctccctcccactcacacttgattggccaaagcaagtcacatgacactgcttacctgcaagggggcagggaggtgcaacgctactaagtgcccgggagagggagaactgcaatttcttggcaagcggcaaaagataaccacagggtactgtttcatcaagggccgcccaaagccctgtctgaatatggggctcgtgtttcccctgctatgtagttacacaggcctcctgcagcttagtttcagcttttctagtttttcatggctcccagagggaatattttctatgccgtatagcctgttttcacatgaagccattttggggtgttatagtaacagctggtgacttgattttatttatgttgctatgtgctgaaagctttatgaatgttctggctgtgccagttactagctgtgggacatggaacaagttatgaacaacctatttaccttctccaacccttagttcatttatctgtaaaatggggataatactatcttatagggctgttggggttgttgtgtgagaaagtgcagtgtgtatgtgtatgtgtgtgtgtgtgtgtgtgtgtgtgtgtgtgtgcagaatgggtagaaccgtgcccagaagtaggaagccctgcatatgttcaatatttagctattattttgttgttgttgtttgtttgtttgtttttttgagatggagtctctctctgtcgcccaggctggagtacagtggcacaatctcggctcactgcagcctccgcctcccgggttcaagcaattctcctgtctcagcctcccaagtagctgagattacaggcgcgcaccaccacgcccagctaatttttgtatttttaatagaggtggggtttcaccatgttggtcaggctggtcttgaactcctgacctcaggtgatccacctgcctcggcttcccaaagtgctgggattacaggcgtaagccactgtgcccagccttagctattatttttattccttcaattttttctttggggcagtctggagaacagtttcatgtgaacattctgatcacatggaaaagggaaggtttactcacgtgtcggaagaggtgtgaatggaaagtagtaaaggcatggtttctgatgttcatgtttgtggaatctgtcgtctatggcagatgcttccccgtgctaccaatttgtgtgtctgaaaggacacccgtacattcatctgcatcctcaaaatctgttcctccgtgggtttctccatctctgcaaaatgcactgctgtccactgtgtgcctaagccagccctgtttggtcaattttttgaaggctgtagggtagagtggtcaggaacaagaagccctggacccaagctgtcagggttcaaatcccagctcacctggtattgcaaatcgcatgggtgactccaggcaagcaactgaagccgtgtgtgcctcggtgtcctcatctgaaaaaggggaatgagaatcatagtatctatcttacagggatattgtaaggatgaaagattagctgttggaactgtgcctggtgcagagaaactacttcatgtgtgctttgcacacccgaaaccttcttttttatatttatttatccttggcctgggggctgtctcctctcactcagtggtgtgtctcatttgttctcctctgtgcctgagccagcacatggcacatcatattttctcagtaaatatctggcagaaaaatgtattcatcagcctggccaacatggtgaaaccccatctctactaataatacaaaaattagccaggcgtggtggcgggcacctgtaatcccaactacttgggaggctgaggaggaagaatcgcttgaacccgggaggcagagg[138 bp omitted]atagccccgccttcatcaaatgtcaccctgccccttaaaatgccgcccatgcatgttctcccacctactgcttttgtttccaatcattcctaatggcccggatctattggatcccagcatcactgcttgttagcgcagtggccttgggcaagtcactcctctggtgcagatgggggtccctaagaccaccctcagtttccatgattcactagaaggaatcacagaactgagaaaaattgttatagtcaaggctacagtttattacagcaaaaggatacagagtaaaatcagcaaaggcaagagccacacaaggcgaccccatcagtctctctgattccttaattatctaacagcagcacatagggcagaggccaagagagaccagcatgagctgccagatgtcgtctctcagtgaagtcccatggacagtgctcagttctcccagcaatgacatgtgacaacaatgatgtattgctagccagggacacttacttgggccttggtgtccagggttgttattggggtcagccatgtagacttgtgctgaatactgctgagagatcgagacagacggtaagaacggctgagagctgatgcacgccaggtgtccttccatgcgttggccaggagtgatctcattttagcccatccatgaccctgttaaatagacatctccatttttccagacaaggaaccaaggctcattgaggagaggtcacttgcctgaagtcccacggctaataggcaaatccaggagtctgatccttaaacctccacccttacagatgtggccttggacatggctgcacaccctcgcgtgagttcactcactcaggatgtattgagccattgttccagggcaggtagcattcaaagcatcaggggtgctgttatagccaaggctacagtttattacagcagaaggacacggaataaaatcagcaaagggaagagccacatagggcagaggccaggagagaccatcccgaaggggaacatccctgtgcttgtggggcttccatcttaaggagggcaagcaggcaatgggcagatcaggaaacgaagatatgacttgccaaagggtggtaagtgccatggccaaaaggaggcagagagagatggggtgtctgcttagttgggaagtcacagaagagcgggacgtgatgtttgaacagagacgataattataatggccactttcagaacacttactatttgttggataagtaataacagtaatatatgtaccaggcaatgttctaaatgcttgaatgcatctcatctttccaatcacagagatgctcttattatcatcactttacaaatgaaagggaggttagggaagttggcagaaggcacacagccaggaagcaggggctccaggatctcagcccagggatcttggcctcagaggctatgcttttcaccactgtcctgcctctcagtgcatggagaaatgaatgttcagtgcctagaagggataatcagggaatatggaggttaaggaggcaactgaggcacagagaggttaaatcgcagggttcagaagtgttgggggtgggactcaaagctaaatgatctgcctccacaatctaagctcattaccaccagaccagtcatccttaagcatgcataggagtcccctggagggcttgtcaaactagattgctggggcccgcccccagagtttcagactcagtgggtctgaggtggccccgagaaggtgcatttctgtccaggtcccaagaaccgatggtgatgctgctggtccagggcccacattttgagacccactgccctagactgcctctcagcacacggaggaatgaatagccagcttccggcggaggaaactgaggctcagagaagctaaaagtgtcatgtggaaaaaatcacatagccgttagactgtggtacctggatctcaaacccaggcaatccggctccagagtgtttttaaccatttccctgcactgcctcctgccggtcaaaagaataaatgcatatgcaggcaagaatgaatgggtggtcccatttccgtagaaggggaaaccgaggtcggggagctgggcggggagaccccagcatcctctgacctctttccttgcctccctgcccccgcccgcaggtgaagctggtgttcgtggaggaccaggctgtggtggagacggtgttcttcctgacgtcgcgcaccagggcgctgctgcggcgcttccctcgcatgctgctggtggaccggctgccggggctgcagggcgcgctggatctgctggccgtgctgtgcgtggacggctcgggccgtgcgcgccaggctgcctgctgcgtggcgcgcccgggcacaccgagcctgctgcgcttcgcgctcgcgtcgctgctgcagagcgcgccagacgtcaagggccgcgtgcgctgcctcaccgccgggcccgaggtggcggcgcagttgcctgcagtgcgccagctgctgccctgcgcgcgcgtgcagatctgccgcgcgcagggcctggagacgctcttcagcaaggcgcaggagctgggcggcgccggccgcgaggacccgggcctgtggtcgcgcctgtgccgcctggctggcgcgtcgtcgcccgcagcctacgacgaggcgctggccgagctccacgcccacggcccagccgccttcgtggactacttcgagcgcaactgggagccccgccgcgacatgtgggtccgcttccgcgccttcgaggcggccagagacctggacgcgtgtgccctggtgcgaggccaccgccggcgactgctgcgtcgtctcagcccctcgcgtggcgtggcgcagtgccttcgcgacctggtggccatgcagtgggccgacgcggccggggaggcggtgcccgaggggcccgatggcggggggccttggctggaggatgagccagggaggggagcccagggggagaacgagagggtgaggggcctggagacaggcgactggggaggggctccgaaagaaggaagtatttggaggggagcccagatggagaaggagtgggcaagggcactggaaaccagagactggggcggggctcagttcgaaggtgagaaggggagggcactgcagatcagagattggagagggggtcggttggagaatcagaagccgaggggactggaagggggtgtcttgagagggtcgaagttagagaaagggcacctgagagggccagagattagagactggagggggccccagttggagggtgagaaagattggggactggaaggttatgtctggagggggtcccagttggaggaccaggcgctaagaggattggaagggtatacctggagggtggcccagctggaagatcgcaggagtaccaccgacctgagggggacccagtttgactatgagagggtcaggagtcttgaaggaagcccctggaggggggcgcagctgcacgatgaaagggcagggggactgagaactgcagaatggaaggggccacagtcagaagtagagaaggggagggggctggaggtcagaaacttgagggggatccccttggagaagtccctggagttggcccctgagaacggagaccaaaggggaccccagtgggaagatgagaggaggagagggccagagattgcagaggagaggggagcgagggtgggggtcaaaagaagaaggggcctggaggatatagttctggtccagctgggagacacgagggtcacaggcatggagaatggagatggagggggagcccggtccgtgggccccaagagccgagccggacgagggatggagtggggagacgcaggagggcggtgtctagggctggggaatggagtcgtgtctggcaccccggtggggactgtattggaaggcagcccagaatgggcagcggcgaggagtgaacacctggctgcaggtgacggcctgcaggaaggaggcgaagatggccccagggaaccaaagaggctttgccgacccccgggagaggaggaggtggactgggaacccctggccaaattccgagcagcctgcgggccagagctggcagacctggtggctgaggagttggcctttgctaggcagcatgggacccggggtttccactggaccggagctggctttgcccttaaggacggcacctcggacttcttcctggatggggccctgacacgctgcagctgctcaattcacgccgcccgccgtctgccctgcagacacctctttgcagcgcgcctcctcactggggctgccttattccacatggacctgctcagggattgctgggggagagccccagagccctgacccttcatgcctctgcccaccaccctccaccaggagggtcggagggcattcttcgatcccaaagataatagggctgaggccaaggagaccgttgcagtccccctggccaccttctgggtcatccagggacctcctcatggcagtttgcctctctgggtccaagggcaagctgtaagtggtctctgaggtcctggagccacagcttgggaaggtgttgatgggcagggtggattctgagggcttccctctggagaggaagcatgtgatgagaggtgtagacagggtcaggctgggacagaaggaaggaaaggggcagagctggggggagggggaggaagcgatcatatggggagtgtctggcaagagtagactggccagtctagggagtgcagcggggagaggggaaagggagaaagtacagaagacagatgaaggagaggaggtaagcgagaaaaaatggaaaggggagccggaaatggaggagagaggacaagcaaagagacagaaatgaagacatgaggaaaagctgggggaagcaggagaggaagggacgggatgtaggagggggaagaaaaatcggagatgagacaaaagaaatgtgtgggagacgggtagagacgaaatgcaaggggcgtggttttggtttttctccaagacctggagacatcgacccccatcgccttctgaagagagagggagggcgggcactgggggtcaggagagtctccagcaggggaggggaattgtttggactattgttcttcaggattggaataaaacaatcttattttggtttccgtgatgagttcttggcttctggggttggttgggagtcccagatccagggaacagttgagatggtccagcgttccttcattctttctaccgacaaggcctcctggggccagatggatagaggagccacaatgaattcatctccatagcaactcaagcttcctcctccatcatctggaccagtgcgtcccagtggcaacttcttgacatgagtcgattctaccttcaaatgactgactcatgccaaatgtcctggccacagaatgggcctgtgacccagtcctggtcaacgagtctgctcaggttgaggtgggaggcttttttatttttatatttttgtagaaacagggtcttgctatgttactcaggctggtcttggactcctcggcttaagcaatcctcctgccacagcctcccaaagtgctgggattacaggtgtgagccactgtgctcagaactaggaagcttttttttttttttttttgagtcttgctctgttacccaggctggaatgcaatggcacgttcccggctcactgcaacctccacctcccaggttcaagtgattttcatacctc[134 bp omitted]cagcctcctaaagtgctgggatcacaagcgtaagccactgcgcccggcctaggaggcttctaataaagattctatcactcctaagaaggcctagagacatgatcaggcctagacctgctgatgattaccttggtatggtgtgataatgaagtccacactgaggatgacagagctgagatgaagaaaatctggatctttgcttggctcagttgagtctctcgagtctgctctaccatggggcttcttaagtaaaatatatccttttttgttagagacagtgtctcgctctggcccaggctggagtgcagtggtgcaaacatagctcactgcagccttccagctcttgggcccaagggatcctccagctcagcctcctgagtagctaggactataggctcgtgctaccacctagctaatttctttttcttttcttttcttttcttttttttaactttttgtaaagatgaggtctcttgctacgttacttgggctgttctcaaactcctggcctcaagcgatgcccctgcttcagcctcccaaagtgctagaattacagatgtgggccattgcacctggccaatcaaagataccctaatgatttagggaagtttgagttggggtttctgttgtcgcaactgatgaaggggatttaattctattataggtgacaaagtccaggttgaagtagctcagcatttttcaaactttagcgtggacgtgagtcacgtgggcaccttcttaaaatacagagtctgactcagtaggtctaagatagggcccaacattctagcaagctctccgatgatgtggctgtgctgggttgtggagcacactttgagtagcaatgaaggaacttgagataaaagacaattcaggccgggtgtggtggctcacacctgtaattccagcactttgggaggctgaggtaggtggatcacttaaggccaggagttcaagaccagcctggccagcaaggcaaaatcctgtctctactaaaaatacaaaaattagccagatgtggtggcgggtgcctgtagtcccagctacttgggaggctgaagcatgagaattgcttgaacccaagaggcgcaggttgcagtgagccaagatcgtgccactgcactccagcctgggtgacagagcgagactctgtcaaaaaaaaaaaaaaagaaaaaaaatgattcagtggttcaagtcatgcgaagtcaaaggctttgatggcagctgactgcaggggctcaaacaatgtcaggtttcccctctctcgcctgcttttcgtgcgatggatttcttcaaaagacagctctctcctgagaaagggggggactagaagttcccatatcacaccctcctatcttgatccaaaaataccattctatcagcattcgtatattaagtctcaaggaagcagcaggttggatttatggaggttatcagttatccatggctacataaatgctgtgttaacaactataaaacttcctaagtatataacaataaacatgtatttggaatcaacctaaatgcccatcaataatcataagctagataaagaaaatatggtacatatacaccatggaatactatagagccattaaacaactagatcatgttctttgcagggacatggatggagctggaggtcattatccttaatgaactaacacaggaacagaaaaccaaatactgcatgctctcacttataagtgggagctaaatgatgagaagaaatgacacagagagaggggcaacacacatggagacctactagggggtggaggatgggaggagggagaggatcgggaaaaataactaatgggtactaggcttaatacctgggtgacaaaataatctgtacaacaaacccccatgataaaagtttacctatacaacaaacctgcacatgtacccctgactttaaaagttaaaacaataataaaaatgaacacgtattgcttatgagtcttgggtcacctgaggggttggctagacccttgcttttcagtgtggtgcatgcaacagtgtcatgaacattccctaggagcttgttagaaatgcagattctcggctgggcacggtggctcacacctgtaatcccagcactttgggaggctgaggtgggcggatcacctgaggtcaggagatcgagaccatgctggccaacatggtgaaaccctgcctctactaaaaatacaaaaattagctgggcgtggtggcgcacctgtagtcccagctactcgggaggctgaggcaggagaatctcttgaacccaggaggcggaggttgcagtgagccgagatcgctccactgcactccagcctgtgcgacaaagtaaaactccatctcaagaaaaagaaagaaagaaaaaagaaagaaatgcagattctcaaacccattccaaaactacagaatcagaatctcattctaacaagatcctagtatgcatgttatactttgaaaagcaaagcaactgatcataaacctacaattatcggaaataggcttatttaaaaaaaatgaaagcagctaatcttgataaagtagctgatcttcgttgggcttgcccacatatcgggagtcatctggcttttgggtgaactaaaaaggccttggcagggcttggtggctcatgtctgaaatcccagcactttggggggccaaagtgggaggaccgcttgagcccaggagttcaagacgaacctgggcaacataggaagaccccgtttctacaaaaatagaaacaaaattagcctggtatgatggtgcacgtctgtgatctcagctactcaagaggctaaggtgggaggatctcctgagcctgggaggtcgaagctgcagtgagccatgattgttccactgcactccagcctgggtgacagagtgagactctgtctcaaaaaatgccttggccgggaggactagggtaactcgttcagcacgtagacccctccagtacaaccctatgaaacttccctgcagcccctgcctttgcagacagctcttcgtctgctgtgctgcccattgctttcttgcaatgtactatctgtctaataaatctgcctttctttccctacgactgtcttgataaatgcctttacctcccatgatactggccccagctagtcacacccgtgatgcccatctcttttttttttttgagatggagtctcgctctgtcgcccaggctggaatgcagcagcacgatctcggctctctgcaagctctgcctcccgggttcacgccattctcctgcctcagcctcccgagtagctgggactacaggtggccggcacc[184 bp omitted]aaagagagaaaggaaaggaggcaggagggatcctgggaaggcaaacaacagctattgagcgcaaaccaaatccaaaacttctccacttgcctgttttatcattagattcttagatgtgggctatctggttagtgacgggaagctgaattaattcattaattgattcaccaaataacacacagaaccctggggtggaaaagagctcagcccataaggtaaagagaagatgggccagtgtagatgggtcagagtgtgaaagagggagagatttggacagtgaaatccgcaagcccttaaagatagaagatgaggtgagtctttatcctgggaggtatgggaagccttcaaaaggttttaaacagagagtggcttgattggatgtacattagaataaccacctcccctaccccagaagctttactgtgacaaatggattggatgagtccagaccaggaagagacgtatgtgaccataaacaaacaaataaaaataaattttaaaaaacaggcagaaggatcttcacagaactggaccttgaagaatgtgtttgccaggaaaagagaatgaagaagtacgttcctattggagggaactgcacgtattacagtatttggcccttcaggaaggcaagaggaaactaaaggttagtaaaccttaaccctctatatgccccacatatatagctcacagtgttaaatcaagtttagcctaaagctgcctccttacatattttaagttcggcctgaaggtttttctgtacgtcgtgaactataacaagtggaggtgtaaacagaaggtggcctacgcttgtgccaatcaccgagttttgggcaatcaaatgtagccaactgttcgaactgtgtacagcaaacgccgagctgtaatcaatccagctgtttctgtacctcacttacgttttctgtatgtcactttcctttttctgtccataaatcttccaccacatggctgtgctggagtttcagcctactctggcccgaggctacctgattcgtggatccttcattgctcaattaaactctatttatttatttatttagagatggagtctcgctctgttgcacaggctggagcacagtggtgcgatctcagctcactacaacctccaccttctgcgttcaagcaattcttgtgcctcagcctcccgagtagctgggactacaggtgcccaccaccatgcctagctaatttttgtatttgtagtagagacagggttttg[132 bp omitted]aagtttttcttttatcacaagtcacatcaatccctcgggcccctgctcaaatgccacctcttcctgaaagccatccctaagtagtctctctaaagagccatccctgcccctttctttgctttatccttcacagcacttatcactacctgaaattatgccacacagctatttaccactttggcattgtgattaagcttatcaagtatgaagccagactgcctgggttcaaatcccagctccactacttccttgtcatgtgaccttccagcctatgttacagttgaggggtcataatagtacctgtctatagggctttgtgaggatgaatgaattagtgtgtgtaccagtgttctaacatcgcctgcatttccatttttcccaaagcagcccagttacttattaacatactgctttttccagtgacacgtgttcacagttattaagtcgatctcccgccaaaatagaagctctattttgttttccattgtatccccagtgcctagaacagtgcctgttgcaaagtaagctttgagttaaaaaaaaagatgaaagaatgaaaatggcagactgcctagcagaactagcccttcccgatgtttcattgttgctatagtgacgatccagtctgcacgaagatcccagcttccttaaccttgttcctacctccagccagctcacccattggccacctgtatctcctgctgtagcagccagaaagctacaactcccagccggctgagcgccaccagcgctttcgcgtccaagtccctttgctgagtgtgagggcctgcgcagtagaacccgcgggcccagagctccatctgagcatgtgcaggctgcggggtgtttccttcgtctgctggcgggagaggagtggggaggagctctttacccgctgagcattgtggggcccgcttggatctccttgtccaaagggtctgggcgccggggctgcagtctctgggtgaggaggcggacgcgggaaacctgcttcggtctccatggttacgagccgctcagcgcgcaggagggggattcaaaggttggcgttgccacagtaaccctggagtggaaggagacggggattagagacctcgcgggagaaattagactaacagcctgggaactggagggatggagggtgtgccggaggaatcagtctgcagtaaggggagttggggtgatattaggggaaatgggatgttttcaaggacagggagtgttttggtgaattcctatgtaataaggagatttggggagatcattgaaatcgacaagttactagatacttgggatgctcaaggggaagtggaaacgcagtaggatccgcccgcctcagcctcccaaagcagtagggaaaattggggtattaagctcttttgccattctgcagttattatagagctcctgctggaagccaggcacagttgacagtactggtaaacaggacagatgtgactatagacggaattggggtttcatggagaaggggaggtataagaaaaggggactgttgtcctctatgggagggactgggaggcgattgggaagaactggcgctgtaaagagaagctggaagttttataagggaattgaggtattatataagttaattctgttgttatttatagaaggccaactcagtagcagcctctaggaagcactgaggattcctcagtatgcaaaggcatttagtgatagagttaccagatttagggggaaagcaatggccagttaaattctaatttcggaaaatgcataatattgtagttactctctgttgtttatctgaaattcaaatttagctgggcatcctgtattttatttggcagctctcattatggttaatttaagtgtttgtgaagagtgggttattataggggaaacaggtattatagagtaattgggttgtaggaggagctggggatagtcaggaaaagtcggagtgttgaagctaacgccaagatcagcactgactgtgtgccagagactatgctaagtactcttatttttaaaaacgttttattatggaaagtttcggccatatacaattgtttgcttgtttttgagatggagtcttacgctgtcgcccaggctggagtgcagtggcatgatctctgctcatttcaacctctgcttcccgggttcaagcgattctcctgcctcagcctcccgagtagctgggattacaggtgcgcaccaccacgcccggctaatttttgtaattttagtagagaaggggtttcaccatgttggccaggctggtcttgaactcctgacctcaagagattcacccacctcagtctcccaaagtgctgggattataggcgtgagccactgcgcctggcccatatacaattgttaaacagataatatataataaagctacttgtacccatctctgctttacatgagtgctgttgaggcatcccaacattcctatgaggtagcgttactgtcacacccccattttacagatgaggaaactgcaccacagagaggttaaataacttggccagaggtgttagaaccagaatttggacccacacaatcgggccccagagtctgggctctcagctgccatatcacatgtaacctccgtctgggaaatgtgagtagggagtgaggcatgatgggagcaacaagagagtagtagtaaggtataaaaggaaaggtagggaattgggccgtttgagcattgtgcagttgttataggatttttatttttattttttgagacagagtctcactctgtcacccaggctggagtgcagtggtgcaattttggctcactgcaacctccaccttctgagttcaagcaattctcctgcctcagcctcccaagtagctgggattacgggtgtgcgccaccatgcctggctaatttttgtattttcagtagagacgaggtttcaccacgttggccaggctggtctcgaactcctaacctcaagtgatccacccgcctcagcctcccagagtgctgggattacagccgtgagccatcgcccccagccagttgttctaggatttttataagatgttttgggagactgggggagttacagaagagtttggtgttttgaaacattatgggaagttgtatagttgcatttcaatagaacagtagcagctagccacatgtgggtgcattacattaattataatgaaataaaactcagcacatttcaggaagcgcctaccgtattggatagtgaagatctagagcagtcccaatgagtctggataacagggatttagggtaaccaagggttaaggcacaagcaggtgcagccagttctaggcaagattgggcagcatccaggccacatcctcactcctgtgataacaagacagaagtctccacttcagcctcttgattggtcacgggccaatccttcatagggtgtaaccaactggaggcctctaaagggcacctaggggtgttaccaaattcttttagcttaatgaaaactctaaagagcactgcagtcaggggctcttgagctacttgctcaagcccactccgactctggagtgtactttcacttccataaatctgtgctttcgttactccgctcttttgttgctttgtttgtgcattttgttcaattctttgttccacacaccaagaaccctaacaactcacagtcaggaccttccatagggtaacaccatcactgcagaaagttctgttggacagccctgatgtgtggggtgacaagtgtggaggctttcctggctcctaaagttcgaccttatctcttagcgattgctctcgtacttcctctgactcacccctaaccttctcctctctgttctactaaaaatacaaaaattagctgggcgtggtggtgggcacctgtaatcccagctactcaggaggctgaggcaggagaatcacttgaacccgggaggcggaggttgcagtgggccgagatcacgccactgcactccaacctgggcgacagagagactctgtctcaaaaaaaaaaaaagaaaagaaaagaaaaaaaaaaccatgctgaattggccaaatatttatctaggacttcccagcctgagaactgtaagaaataaaattttactctttaagccactgagtccatggtattttgttatggcaacctgagcaggataaggtagtatacatacctttaacttcactgtgtaacttcagattaatttccaaaatcaagcattacctaaccaacagcagaacttacatttgtgctccatatactcaccagtagtaggcattactgacttcttaataaatggaagtttgatgaatataaaatgtagtatttttatggcttttaatgaggtttctgataactagacgtatgaaattctacttttgttcattgtccattgcgatttacaaactgtaacattttactcataacgtttgcccatttttcacaaggagttttctgtttgtttactcatgttgaatcatttttatgtattataaatatcacctgatatttacatcttcttcttagtagcttcattctaatgaacttcttcttttttattgttgtttttctgtttttttttttttttttttgagacagaatgagactctgtcagccaggctggagtgcagtggtgtgatcttggctcactgcaacccctgcctcccaggctcaagtgattctcatgccttagcctcccgagcagctgggattacagacatgcaccaccatgcccggctaatttttgtaattttagtagagacggggtttcaccatgttggccaggctggtctcgagctcctggcctcatctgattcacccacctcggcctcccaaagtgttgggattacaggcgtgagccactgcatccggccttctatttttaatttagcatcctcaaataaatcaatttaacttctaaaaatgtgtgcctttttgttttaataacattaacctatttttttatttttgtaaatttatgaagtacattcttcaaatgtaacaatttagttctacttcaagataaggtatagacaactgcaaaattccactgtccttacgatcacaatcatgaagaggatggagctgcagaatctgagcatataaagacttttatgaattctaacgcccaaccccaacttgagcattcattgcgctggtcctaattcacattcaaacgccctgagaatggagctaacaggatacactgcacccaatctcataggcacacacaggatagatccgaataccactgcaaagacttttaaaatgagctgatattaagacctcagttcacagaaagccaaataaataataaacatcttctgttggatacaaataaaacagagtctcataagataacattcacatttcgagggtacatatcggaactactgagaatacaaggatgagctgcaaaaatctccacttgtctggcaaatgacaactcagtggacaccaaacactgaataacatgtacagtgaaattatctgacaaagactttaaaagagacattataaaaatactcaaatgaggccaggcacggtggctcatgcctgtaatcccagcactttggaaggccgaggcgggtggatcatgaggtcaggagatcaagaccatcctggccaaaatggtgaaaccctgtctctactaaaaatatttttaaaaaaaaattagccgggcgtgttggcatgcacctgtagtcctagctactcaggaggctgaggcaagagaatcgcttgagcccgggagacagaggctgcagtgagctgagatcacaccactgcactccagcctagatgacagagcgagactccatctcaaaaaaaaaaaaaaaaaaaaaaaaatactcaaatgtgccaggtgtagtggcctgtaatcccagcactttgggaggctgaggtgggtggatcacttgaggccaggagttcaaaaccagcctggccaacatagcaaaactctgtctctactaaaaatacaaaaaattagctgggctgtggtggtgcatgcctgtaatcccagctactctggaggctgaggcacaataatcgcttgaaccaggaggcagaggttgcagtgagctgagatcgcaccactgcactccagcctgggtaacagagttgagaccctgtcttgaaaaaaaaaaagctcaaacaagcaaatgctgacacatttgcaggaaaatagaatataaggcaagaaatttaaaatatagagaacaaaatggaaattttagaactgatacatacagtgaccaaaatttaaaaggtggtgaatgcactcagtgggacgacacagataacaacaggtgaacactccagcaaatttgaaaatagacaaattaaaattacccaatcagaataatggaaaaaatgaaaagatgttctaaataagtagaatatcagggacatttaggaaaacataaaagtctaacatttccacaataagagtctcagaagaggaggaaaaaaacaaaatataatattgattgattcaacataaatactatggtttatttctagatggcaaggaaaatcacatgtaagaggtttccatttaaaagaattccactattcatcaaaattttcatctattctcaagactgttgatttcaaactaggtttagagtagcaaagcatatgaattttacagtagaagacatgagaaggatataaaagtttgttttctgtattctttcaaaattcttattttgaaggccttctgggcatataagctattggaacttgtcatcacttaaactatttcctataaagatgaaaatcaggctaataaaaagtatttttagaaattaggctgaaaacctctaagtttggtaaaagacataaaactgcaaatttatgaattggagcaaattccaaagggaataaaacaaggaaactcatccccaacataatgaaatggctaaaaactaaagataaataccttgaaatctgacagaaaaatgacacactacatacagggaaacaacaatttgaatgactgcagatttctcatcaggaaatacggaagctaaaaggaaactgctgaacagaaaacaatgtcaactaaaaatactacaagcaaaaaacatcactgagaatgaaggtgagaaaaagatgtcctcagaggaagcaaaaaataagagaatctgtacctatcagaaccactctaaaagaactaaaaaacgtctatcagaggaagtggaaatttgcagaacgaaatttggaaaataatgaaggaagagcaacagaaatggtaaatatctggaaaaacataacagattactcttctcatgagttttttaaatcttctgagtgattaaaagtagaaaatatataataatttattgatgggttttaagatacagaaagattatgtagaagataactatatcctagatgagaaaaggtaataggatctaaatggtgataaagtgcctagattccactttaagtggtacaaatgtgataacagtagaatagaaaagacataacaaactggctgactgaggataaatcctaacatattaataattacattaacgtaagtaattgaaatcttccagttaaaagagactatcagaatgggttcaaaatacaccataaaaaaaactgactcaaccagatggtgtctactaggaacttgttttaaacagattaaacataaaaggatggaaatatgtgtgccacgaaaacattaatcaaaagacagctgaaatggctacaaaatgacagagtctatggtagaatccaaatgtcagagttggcttattttttgtatggtacattgccaggaatgtctgtctcagaataagctgaattaccctcattttctttttggtggttctgtggagttgatttaccacatttcatctcagtattccttggagttgaccatgaacatttaacccaacaactccttgtagcaggctacacaccagtgggaaaatattttctgctcatgtttgcattttctcccatttttgtgctctctttcagcaaatacatttacattgttctaataacagtagccatagataaagtgttaaagtcctaacatacaaaaaaaaaaaagactgtcatcatgtatgccttgagtgtcctcagctgagaagcttttgttagcttttctgcttttagttatgagaaggtgatacttcaaacggagtgtccataggaattatttttcacattaatcaggaaaagttgcctttccaggccccatccttcataaacacacctatccggatgtcctttatcctgggtcttcaagaatcatgtcaatggataaaatagtgatatatcaagcaatggttggaaaaaatttaaaaggaatattactaccttcttcagacattcttgaggaaaatgcatgaggatacagtcaataggtacatgccaggttacaagtctgtcctgaaagcctgtgtgatagatgttacccagtcttcttctgtcttgaacactgaaatcaatgatcacatttctgtttatccatttccaatgagaacgctggattctctcttccagactacctaactgactcattttacaaattctgctgtctaagataggacacgaggtaagggtccctttcactaatgcttctgaagagcacgtccagggccaggtcccctttcttctccaccatgctcagcaaggcctcattcttgctctgccgtgtcttttcctgctccaccagctccttctcattctcagtaagaacctcattgtcttggagatcatcgagcacccctttcaggtcccccatcctggcttggagttgccggtggttctccttcacaaaggctgcacctggatgaaagggggagtttcagactttgagaatcgttcacttacaggattcaggatctataccaagcttagagtcaaaattcaggggtgggagattgctccttgtgtctgtagcttaatttgtggacatacaaaatcacacacattcacagagcaaatataccctttgcagtatcaaatgcattgaggtgtctcaaataatgtatcttcctcagtcctactcctctcatccatttcttgaagcctgtttcttcctagttggtgtttttcattgaaatcctagacagagctctatcttgctgtacatacatttatatataaatccctctaacaacgaaacacaaatcttctagttcatacattgtcagaaactgtgcatgatgctagaggtatggagaaggattcagctggatccccaaagcttagctggcagagctatgaaagaagagatttaactggagacatacaatgcatagaaaaggaagaacaggggaaaagatacagacttttttccatcatgtagactcagggtttacgttgtgccccatataatgtctgtataaacttggccaaatcatattacttccatatcacgtggtttagaatgcatggaggttgaggtgtgattttgactcaagacatgttctggaccagcttcctgtagactgagctactaagctttgatttcaacgtgcaggcaacaggtgctatattttgctccacatcctaaacattatatttaggaagggtagaagccttttgttggtgctgctcagcctgcagtcaccacctacagagatgttctttgatttattttaggacgtcacctttatctgattcttaaccaagctccttagctgatcctcattgcacctccagatgtgaggcatgatttctttttatttaatctgcctcaatggccttccaggcaacaacagctaggaaatggcatgattgccatctcagaaggtgctctcttttttctcccagtggtctgttttgagacatgagttcggaaacttacactgtgtggagcctgacaatgaagccaacaatatggaaggcgggacgaagacatggagaaacattcctcccttgtgatgttgtttgagcccatgaatcagcctccctggagtcagtcccacatctcttccttgaactcgcctgagccatgacactcttgataatttcactccatttaagttggactttctgtcatttgccacacaagactttacacagatccagaggacattgcagattgctgccttgggtgatttttaaaattaacgtggacatgaagtcatcaggagacaaggagttccaaacctggatttattgcttactagatgatggaaacttggtcctctcagtgttaactctattttatttatttacttatttatttatttattttgagacaaagtctcactcttgtccccaggctggagtgcgatggcacgatctcggcttactgcaatctccgcccctgggttcaagcgattctcctgcctcagccccccgagtagctgggatcacaggcatgtgccaccacgcccagctagtttttgtatttttagtagaggcagggtttcaccatgttggccaggctggtctcaaactcctgacctcaggtgatccacctgcctcggcctcccaaagtgttgggattacaagtgtgagccactgcacccagccaactctttatattaaataatgtaaataattttttctctgctatatactaattccagtgtccttaacagatccttggctgatatctgctcttcacttttacaacagccccaccgttccccacttcctattcattcccaacccacactcaatcatccacgctgttttgaagagccaacacattgttatccatcctttaatagttactcttgcctttccgtctaaagtccaaaatatttcaacttttattcttggactttcaactgccagctcttgactatccttctcatgtcacctttactctgtccctctaacagtttaattcacagccatatcaaactactttaacttagagttccccagacgcaagatattaaatatttacccccaataatttgctgttgtatgctcttttgtgtctacatgatgtcctcacgcccttctgggactaaatcatactcattgtctgtatttatgacatcagtcattcttggcagatgacaaggatggaaggaatggagccttgctgagagatgctgttacagcaggcagctcgtcagatatgagcagggcaggagaggactcctcaccccaccagaaatgtcaggcaaccatcaggtgatggtcaggcagttgttacaccgtctctctaaaataataattggttgcagccggcaccagggaaaggccgtctcctgacagagagaaaacacctgaaactggtgatcagcagcttcccaataagatctcgggaactgggccagtgggctcaagaatgtgcattaagagcagagtttaactggcctataacctcttacggaggttgagctggtaagggaagaatgcctcaagtgagcatgcgtatgactccaagaaacacactgcgcatgctccccttccaagcccctgcgggccactatgcaggcgaccagcccaccccaggggaagaatcagggaagaagggatgcaagaccccggaagtgtgccaacatattaaaccccaagtcaaaaggtcaaaccgtgcacttgtctttcaagtcaccccctcggccgtcttccaagtgtactttcctccttcctttcattcctgctataaagcttttttttttttttttttttttttttttttttttgtagaccgagagtcttgctctgtcgcccaggctggagtgcagtggtgcgatctcagctcactgcaacctctgcctcccgggttcaagccattctcctgcctcagcctcccgagtagctgggaccacaggtgcccaccaccacgcccggctaattttttgtatttaagtagagatggggatttcactgtgttgcccaggctggtctcgaactcctgagctcaagcaatccacctgcctcggcctcccagagtgctaggattacaggcgtgagccactgcgcctggcctcttgctgtaaagctttttaataaactttctctcctgctctaaaacttgcctcggtctctccttctgccttatgcccctcagtcaaattctgtcttctaaggaggcaagaattgaggttgctgcagacctatacggatttgctgccagtaacgttctggtgccatgtcacttggataccttccactgtcactcaaagaccccttgatgtctcatacatacccttggctttaatgtaaacatttcacttacctgagaaaggaggaggggctgatgcagctacaagctggagatccactacaaaagagggaaaaattatatgatgagatgagataaatcatgtacccttatttagcttttctagtctttgatgcaaccaactgaaataatttaattctacatatgtcataaggctcttgttttgcacactaatacactgaggaaaccccattaagttgtgggtcactcactgacaattcagaaaaggcatcggaggaagaaacacatttttccaatttctttcaacttgcaggccaatatcttaggaactatggggctacaaaaacatatcatacagtgctacataaattacagtcaaagtgttttagacatgaaataacaacattacatgagttaattaaaacacgtgttttttggatgtgattgtaccaagactgttgatggtgcagaaatttgggtacccttataagttgatagaagatttgctaattggagctaccattttggaaaataattaaaaaaatttcccatgatgccttcaatgtggttttgcactttcatctagactccttgatgttttcaaagttcagatgaattttgcaacatgccccccccaccccacctttggcagcagctcagtcaccatgtcaccaagacagaataaatatgagcttcccatctcctgtgaggtctcacaattgagtttctggtcatttgacttctgggcagaacatgagctgccttgaaccagcatactcatccaagacccagccatccacaatctcccccatttcatctagaatttgctatcaaaaaaaaaaaagcatgattgtgacacctggaaaaaatcttttttaaataaaaaagtaaacaatgtaaaaatattctgatgtttacagagaaatggagagtgtggtggcatttgcttactcaaaatatgtattgcatgttggctgtgaactagattgcattctagccactgataatgcaggcaatggggaatccgacatctgcacggcttcttcgcatattaaacatcacaaggagagctaagaagttgcacaaacaaaactctgacaatctgagatgctaagacattttaccgactggagggaggaggcggggagggtgcatgtggaggtgcactcatgagatgctactcatgtggagatgaggcctgggtcggctgagcatcatccaaccctgcaatgtgcctggaaactccaagtgcagtcccagctcatgtgcaccgcctcaacaagagggcagtttgcccagagaaggggaggcacagccatgaagctgatcttgaactctagacaccattgcagggaaaggaaggtgatgggattgtgaggattcagtggaggaaggaagatcagtgactgaggaccacaaagagcagacagtctacaccagtggtccccaacctttttggcacctgggaccggtttagtggaagacaattttttccacggactggagagggaggggatggtctcaggatgattcaagtgcaatacatttattgtgcacctaagttctattattacattgtaatgtataatgaaataactatacaaacaactcaccataatgtagaatcagtgggagccctgagcttgttttcctgcaactaggtggtcccatctcggggtgatgggagacagtgacagatcatcaggtgttagattctcctaaggagcatgcaccctagatccctcgcctgcacagttcacaatagggttcgcgctcctacgagaatgtaatgccaccactgatccgacaggaggcagagcgcaggcggtaatgcaagcaatggggagcagctgtaaacacagatgaagcttcgcctgctcaccgtccactcacctcctctgtgcaacccggtttctaacgggccacagaccggtaccagtccctagcccgggggttggggactcctggtctacacagtcaacactgtgacaatattgccccaaactactaaaatacaacagcagcaacaggcaaaactcagttgaaattgttgaaaaccattccacaacatgtactcacacatttgttcaactatgtccttcttcctgggcattcagtttggtttcatttttttcccaccacagacaatgcctcaaataatatcactgcatacaacttatcttcatatgggtgcttttatgttatagtatggaattctaaaagtgactttttgttcaagagacttgttttaaaattaatctgtgcccatacaactacataaaaggttaaagcgatttatagctcctatgcaaatgttaatatccttcccttcatagagcttcattgaaatttttcatgctgtgttacccaagacaaggatctgctactattgaagatactgatttctgcatcattgtagttattcaaacagagcatggcattttacaaatgtattggagatataaatgtatctccagagattcaaggaactatcaggagatctttggcaaattgtctgggagtttctaaactttaaaaaattgtgtttatgatgttgagcttctgtgaatggataaaacattttccagaactttttaacagattacctcagggaatatgacaccccgaaaatgaaaagcatgagtatggaagaaatgattaaattgtgaagaaagtggaactaaatagtccttatgtttcttctgactcttagaatcttctgttctttaccccctaggttcgagggtttccacccctctcccaggccccttgagcatttcacttcctagagatgaacaaatgccaccattgttgtgttatcacactgataatacactgacaatagatttctcttttttttttcttttttggcaagaacattttattttattcaaactattttttttaatttaatttaagttctgggatacatgtggaggacatgcaggtttgttacaaaggtaaacatgtgccatggtggtttgctgcacctatcaaatcatcacctagatattaagccctgcacgcattagctatttatcttcttctttttttttttttttttttttcagatggagtttcgctcttattgcccaggctggactgctgtggcacaatcttggctcactgcaaccccctcctgggttcaggtgattctcctgcctcagcctcccacgtagccaggactacaggcatgtaccaccacacctggctaattttgtatgtttagtagagacagggtttcaccatgttgagcaggctggtctcgaactcccgaccttaggtgatcctcccccctcggcctcccaaagttctgggtttacaggcatgaggcaccgtatctggccttttagctatttatctagatgttctcccttcccacatcacccaaaaggccccagtgtgtgttgttcccctccctgtgtccatgtgttttaacactgacaatagatttcttttcttctctgggaaagaaccataaacaagatttcttctttgaaatccaaggatagaggtacatgatggatccctgtctaaaaatgccagcctcgcccactcacctacctggcttcacctcagtatcccacaccaaagtcccatgtcttttttcagtaatctcaagttgaatgggttccttcatctgcccagcatagaattttgagaagtgctgaatttctccagggctcctgtaggacaatttcaactcctagaggaaacacatcagttgacttgaagcagtggagggtggaaaggcccggctccctacagtgaactggccaatggaacttaacccgtttcctgtgcaatgtcatggctggttgagtgggaaacagagggagagaggtaaacagctctttacatttacaatgttaggaaatgcttttataccaggaagggaagaataacctagctgtcaacaccacatgagtcagagaaaaactatctgagctaccaactgaatacaaacgtcttagattttgagggttttgaggcccctcattaatgatgcgaccagctcagaatccgagattctatagagaagcaagaaagcttccaaagcagccccatcaggtctctctgagcctcgctgggaagccggggtcagataagccatttcaggtccctctctgttttgcacccagtctccccaggattcctaaaaaaagctgccctggggagcaagaaagccccttatgcaggacagaattaggaaaagcttagctcatgcaaatctctagtttcttcagaaaacaagccccccgacccagctcttggaaaatagggatttaaaaaattacaaagggtgagattgttggctggaatctttttaaatggaagatgactctgaggagagtttacctcgctcaagatcatcacctctagggcgggcgcggtgactcacacctgtagtcccagcactttgggagactgaggtgaccgattgcttgaggtcaggagctcaagaccagcctggccaatatgttgaaacccccatctctactaaaaatacaacaattagccaggcgtggtggcaggtgcctgtagtcccagctactcaggaggctgagg[131 bp omitted]tcttatctcacatttactatgttgtatcattctggatgaaataccctgcattttatttatttatttctatatcagcaatgtttatggaaggttctgcaacagccaagaatgtatcttgcctgaaggacaaccaaacttctggggaaggcagtccctgcttcatattaattgctgtggagtttatcaaggaaactgggaactaaaatcagagcaaggttgggcactttattaaattcttatgctctagtatacttagaaaaagatcactgaactgatgtctgcaataagcttcacatcttgttgtctatatggctggaaaaatcatttttcctattttagccttagtgtccaaaaaggagacatgtaaatactgacacctaaccctcttgtttctcacctcttccaaggtccgcaaacaggaaaaagccatctacgccaaaacaataacattggtccgtcccattctgaattaaagaccttgaaatcactgggatgtgttttcccattaaaactggaaaacaattaaatcttgatactttgttctagagatggtatattgtgctggacaacctcatctttattttagagaacatatgctgtgagacatctttgaaaatctatttggggccaggtgtggtggctcgagcctgtaatctcagcactttgggaggccaaggtgggcagatcacgaggtcaggagttcgagaccagcctggccaacatggtgaaaccccgtctctactaaaaataaaaaatcagccgggagtggtggtgcatgcctgtaatcccagttactcaggaggctgaggcaggagaatcacttgaacctgggaggcggcggttgtagtgggccaagaccacaccactgcactccagcttgggcaacagagcgagactccatcaaaaaagaaggaaagaaagagagaaagagggaaagaaaggaaaggaaaggaaggaaggaaggaaggaaggaaggaaggaaggaaggaaagaaagaaagaaaaagaaagaaagaaagagagaaagagggaaaaaagaaagaggaaggaaggaaggaaggaaatctatttggaaatatactagctttaagttggttaatactctttgaatcagtaatttcatttaggacactctagccctgcaggaaaaatgtaaaaccatatgaatggaaagacttcttgccagggcacttcttgggagaaattacatgcgactaaatgttgaataatcatgaaataatgaaaaaagctctagggatttcgctacatggcatatcatgtcccagtaaatctgtatgtaggaataatttaaattgcacagaattatatagtaatctccatttaaaaatatataaaatgaaatatataacataaaatcagctcttccttcaactaccttaacaaatacatattaagtgcgttagttaggcaagacatcaggactgaagataattataacagggaaatggaaatttcagtttgggaaactcaatgtgtagttttaacctaacataagtatgtcaaatactaaaatgttacctctgccttagggtcttggaaatatgcaatatgattaatactatttttctataatttcaatttttttaaagggcatatttgtgattaataaaagaaaaatgttgcattttgctaagattcttccatttgtttcagaaatataaaacactctgaaacctgctgagttgggtttgaattctactaaccttgggcattactttcaggttagcagaattagacacaatataactggaaccaaagttcaggggttccattgggggcgaagtctgcaggcgcacaccatggaagcgatcttcctcatcatctatcgcctaaggaagaaggggcagaaacattagagagcacaaaaaatagtaaagcaagtagtggcataaaaagttatttatatggtatattaagtagcacgtaggctatgattcaattgatataaagattaaggtattcaactgatataaagattgtgataggtagatacacagatatgaatgaatatgtctctatgcacaaagagacatattgatgaaattttactgaaagatatctcagggccaaaggatttcttgtgaatgtgaacttataaattcttgtatagtttgcttttatttttacactgtggaaagattggctgcgtacttatgaaagcacaggacagaaggacttctttttggtgcctcagcagagaactggtagctcagctgtgtctgtgaacacgtctatgatggacaagggtagagatgttacttctctccgtcacagggctgctgtgagatgctcaatcacctgaccaccagcgagcagaaacagtcacctctgcgaggcccagcagccacagcagaaagcgagacctcaaaactatctctaagcagccaggcacggtggttcacacctgtaatcctagcgctttgggaggccgaggtgggcagatcacaaggtcaggagtttgagaccagcgtggccagcatggcgaaaccccgtctctactaaaaatataaaaattagccgggcgtggtggcgggcgcctgtaatcccagctactctggaggctgaggcaggagaatcac[134 bp omitted]attcaaacaaaacctttctacctttgggaagtctcaggtacaactcaatagagactttgtagaattaatgagcaaggaatttatgctaaaaacaatgactgtcagtgatattattagtccagctgatcgactcccttgcaggataatgaccaagagggacacaaggggactttggggaagctggtgatgtcttgttgcctgttctaggtgctgcatatgtgagtgtgtcaactatgaaaattatgaagcaat[133 bp omitted]gaaaccccatgtctactaaaaatacaaaaattagctgggcgtggtggtgagtgcctataataccagctactcgggaggctgaggcaggagaatcgcatgaacctgggaggcagagtttgcagtgagtcgggatcgcaccactgtactccagcctgagcgacagagcaagactctgtctcaaaaaaaaaaaaagaaataaagaaatgtcagcagatctctatgaagaaaaggatggcccatggagaaaacctgaattgggcctgggaaatcaaataaaagaaaaatttcatattgtattgagcaaagagatgaaactatgatgggggtaaggcagagaagggatgtggagaactatccaggaggcatcacatatatgtttagaaaaagaaccagtttccgaagggtcaaaagaaactgatgggggaaagaaataacatatcataccatctctgatgaacaattcttttacatgaacagatatgtttaaattaaattatagtaataacagattagaactaaatcaccaaataaatccatatcacattgctagggttatgattacggacagatttctgtaggtgttgagagacataccactggattaattttcttaaccttctttatttgttatagttcttatcatatgcacatatatttttcctatagcattccatgtaatatctttggttgtcatgtttttgcctcttttgttcactgatgtatcctcagcctctaaaatagtgtctggaatatataaggcacacaacaaatatttattggatgaataaatgggtttccctggaacagtactgttgaatagaaatgtactgcaacccccaaatgcaatttttttttgagatggagtctcgctctgtcacccaggctggagtatagtggtgtgatctcagctcactgcaacctctgcctcccaggttcaagcgattctcctgcctcagcctcctgagtagctgggattacaggcgcatgccagcacgcccggctaatttttgtatttttagtagagacggagttt[136 bp omitted]agagaggcagatgaaatggcttttagtaatgtatttcatttaactcacaatatcatttaggcatgtaaccaacacaaaaaataattgctatttatgtgcttcccttcatattgtcttccaaatctgtgtatgtgtattaatatgtgtattaaaacttaaatacttaagttttagagtacatctcaactcacatactcaatagccacatgctattgccggccattcaagcctatagctggccagtggttatagagttgaactgtgctgctcttgaaatagggcagggaagttctcagtgcaacaatagatatttagagtttgattatggtttgaagtgaagaagaggtttctcctctcttcttcccttatcctaccctgaatagggaagaagcagacagaccacttttcattcaatgggtcaacaaaatttcaagag[136 bp omitted]acctcagcctcccgagtagctgggactacaggcacctgccaccgtgcccggctaattgtttgtattgttagtagagacggggtttcaccgtgttagccaggatggtctcgatctcctgccctcgtgatccgcccacctcggcctcccaaagtcctgggattacaggtgtgagccaccgcacccggccctccttgtgcttttaactaatttatgattaaacagaaatggtcctgcccatgatatagagtacacaatttacagagaagcagatcataaataaatagacatgtgaccacaacagagggaaagaagagggtacagtgatcaagaacaatgggagaactggagggcacggtggctcacacctgtaatctcagcactttgggaggctgaggtgggcagatcatttgaggtcaggagtttgagaccagcctggccaacatggtgaaaccccatttctactaaaaatacaagaattagtggggtgtggtggcgcatgcctgtagtctcagctactcgggacgctgaggcaggagaatcgcttgaacccggtaggcagaggttgcagtgagctgcgactgtggcactgcactccagcctgggcgacagggcaagaccccttctcaaaaataaataaataaagggagggatggaccagactagagggcctactaaaggctttcggaagcagaaatctttaggcaaagactagaaagagactagaaagatgagcaggagccagtcttgcaagggaaacacaaagggtaagagcccagaagcaggaattcttggagtatttgagggatgaaaattcaggacagaagtgctggaacataatgagtgagaagagagtgataggagatggataactgagatgttctagggtcacaagaagtcatggcttcagctgggcacagtggctcacacctgtaatctcagcactttgggaggctgaggcgggtggatcacctgaggtcaggagttcaagaccagcctgaccaatatggtgaaaccgtgtctctactaaaaatacgaaaattagccgggcatggtggcgtgcgcctatagtcccagctactcaggaggctgagacaggagaattgtttgaacctgggagacggaggttgcagtgagctgagatcacgcccactgcactccagcctgggggacacagcaagactccgtctcaaaaaaaaaaaaaaaaaaagccatggcctctaggccatagtaaattatttgattcatgttctaagtgtaacgtgaatccattaaagaatctttggccaaagtgtgatgtagtaatgtattttttaagtgtattagaattaaaaaattttaattttttttctttccaacatttattttatttattgatttatttaagacagagtttcgttctgttgcctggagtgcagtggcaaaatcttggctcactgcaacctctgcctcctgggttcaagcaattctcatgcctccacctcccaagtagctgggattacaggcatgtgccatcacatccagctaattttttgtatttttagtacagatggggtttcaccatattggccaggctggtctcgaactcctggcctcaagtgatctgcttgcctcggcctcccaaagtgctgagattataggcatgagccaccatgcccagccccatcatttattttaggttcaagaagtacatgtgcagatttgttgtatgggccaattgcatgtaatgggggtattacttattttgcaaaaaatctccctgttcctagattttaaaaataggtggtaaatgaaaaacaatggaaccagtgagataagcttgaagactttatccatatttctagcaaaaatggcagtggatggcactaaagctggcagtgaagctgaacggagtaaaactggttcaagttatgctatgaaaatgaaaagaatcaaaattgatgagatgctggatgtgggaaagaaaagaaatcgaggccgaggggggcagatcacttgaggtcaagagttcaagaccagcctggcaaacacggtgaaccctgtctctactaaaaaataaatacataaataaaataaaaaaatacaaatagctgggcgtggtggcagacaccataatcccggtgaggcatgagaatcacttcacttgaacctgggaggcagaggttgcagtgagctgagattgcaccactgcactccagcctggtgacacagcaagactccgtctcaaaaaaaaaaaaaaagaaagaaaagaaaataagtggaggaattaaagatgaacactagagtatggcttgaatgactcaatgaaatttagtctctaccctgaatggggaagagagttgaataaatcgcttaaagggagaaagttgagtcaatatatacaattagatatgccaaataaacactcatatggagaggggaggttggcggttccaagttggagctctggagaatgttcaggactggagatatagactgagaaatcctctgcttgtggggaattcagttacgagacgaagaattcatcaagtccgtcagtgaagacagaaaagagaaaggagagtccaagattcagccctggaaactcaatattcagagaaggtttcagagcaagaacctgcagaggcgatttgaggagagactcagaaaagtcacggagatgccaggagcagtggtccatgcttgtaatcccaacactttgggaggccaaggcgggcagatcacaaggtcaggagttcaagaccagcctgtccaacactgtgaaaccccatctctattaaaaatacaagaattagccaggtgtggtggtgtgtgcctgtaatcccaactactcaggagactgaggcaggagaatcacttgaacccaggaagcagaggttgcagtgggccgagatcacaccactgcactccagcctgggtgagagggctagactccatcacaaaaaaaaaaaaaaggaaagaaaagaaaagtcacagggaaattgggataatatggtgtcgcaggatcatatagagcagagatccccaacacccgggccgcagaccagtaccagtgtgtgagctgttaggaatcgggctgcacagcaggagaggagcagtgagggagcaaaccttcatctgtatttacagccactccccatcactcacattaccgcctgagctcctcctgtcagatcagcagtggcatcagattctcatacgagcgtgaaccctgctgtgaactgcccatgcaagggatctaggttgcacgccctttatgagaatctaatgcctgatgatctgtaagtgtctcccattacccccagatggaaccatctagctgcagaaaaagaagctcagggctcccactgattttacattatggtgagttgtgtaattatttcatcatatattacaatgtaataataatcgaaataaagtgcacaataactttaatgtgcttgaatcatcccaaaaccattcaccaccctggtctgtggaaaaatggtcttctgcaaaactacttcctggtgcctaaaaggttgggaactgctgttatagaagagtgtttccaaggaagagcgtggtcagtggaatagcattccactgagaccccaggtaagaatgagttgacacaaagtcactgactgggtgacgctaaacagagccattctaaggaagggtggcaaggtcatccacacagagagatctgggaacagagtgagaactgaggaatatggagacttcgggtacatggagctgttgatccattcattgagaagcataagggaaaaattggaagtatgactgcaggagggagagcagtcaaggacagcatttccaatgtgggggccattctagattttggcgggtggaagggagtgatgccctagggtaggagagattgacggtggaggggaaagaggatgcctcgggtgtggctcccacataagggaagagggaaagggacccaagactcatgttaagtagtgtccttgtgtacgaagagggaggcggccgggcgcggtggctcatgcctgtaatcccagaacttcgggaggctgaggtgggtgcatcactttaggtcaggagttcaaggctagcctggccaacatggtgaaacctcacctctactgaaaatacaaaaattaccaggacgtggtggcacacatccgtaatcccagctactcgggaggctgaggcaggagaatcgcttgaacccgggaggcggaggtttcagtgagccgcaattgccactgcattctagcctgggcaacagaacaagactctgtctcaaaaaagaaaaaaagaaaagaaaagaaaaagaacaaggaggcttcttgggtttcagaggaaagaaataggtgaagacgggccagaaacaggctcacagagctgacagtgaaacaatgaggtttttccatcccattttgtttctagtatatcaataaggtatgaagcaagtaagcatatgagatttgggaatgatgaaagaagaggcactaagtgaaggataggaaaagggtgggctcagaatgaaaacagaagttatgcaagaattcactggaatgtatgtatttctggcccactctaggaatagtcatctttatcattcagattaaaatgttttctcctgtatttaagtacccacagttactcaccaccctaagtcctgacaggcaggcacctgcctctcattcttgggatgttggagcattagacggggggacgatacaatttaatgtaatctttctggcataatcgccccacctaggctggaaggacagaagtgggactttatccaggtgcacagcagctacagcaaccagcacgtctgcttcatcactaactcagaagagagtgtgggaatatgagcctttaataagtgcattagagggagatgctactgaacaggaggagggttactccagagatgtgagtgtgcctgtcagtgtaattcacatattatccatttaaaatttggtgagaggccaggggtggtggctcacgcctgtaatcccaacacttcgggaggccaaggcaggtggatcacctgaggtcaggagttcaaaaccagcctggccaacatggtgaaaccccgtctctactacaaatacaaaaattagccaggcatagtggcgggcacctgcaatcccagctactcaagaggctgaggcaggagaatcgcttgaacccgagaagtggatgttgcagtgagccaagattgcgccagttcactccagcctgggtgacagagtaagactctgtctctaaaaaaagaaaaaaacaacctggtgaaaaaatctctgcatcttctctgtcagctggtcccccaaaatcactaactttctccttcttgagagccagaaaagggaatttcctttttcagtagcactgaatcactactgaagatggttagggaagcacatagctccagagtcagcaccttggatgaacctcaggaagggtgactcctgcttctgtccatgaaaaccatgccttgccctttctgttccacgaggaactggaggggccaaggggataacctggaaatataatcgtcatcttctctggtctcctaaatcactcagcttacctttgttagcaaggcgtcgctggggacaaggtacaagtggaacttaatatcttcggggtgggggtgataatagatcaatgtgttggaagtgatggggatggagaggcgagtcccactggcgatccgcagcaggatgcccatcagagagaagctggggctttccaggacagcatagaaaggctccacccgggctggatgctccaggaccatcccttcattcttaaaatgggcaacgagaaaccaggagacgtccacctcacctgctgcaggagaaccacaacagcagtgagacggcacgcaccccagcggcccccacagcctccgctcaccccacattaccttggagggagatgaagtgggggaggtggatttcggcgacagcctcctctggctctgcagtgacatcaaacaaggggccgcccaccagccactgttcatggtgctgcaggtccagggccaggtgctgactccaggaaccaaacgcaatcgtcactgtgacctcatcccttaccaggaagccgaggcctgtggctgaccacagataccagccagcagtggggaaccaaacgctgaaaggagccagagtgatgtcatgacgggagaaccccaggacttggatttaagcagcgatgtgcagagggaggtgggatttgaagtgaggcaaggttcaggacccatctgcgactttcactacattagaaaacgctggggagttcattaacctctctgggccccaatttctctgcattctatatatgttgaaattaaaataccaacttcacagtgcatgaaataaacatattattgatgaaattttagctatcataagggatggaaccgatacgcttccttttgtatttatatttttatttatttatttattttgagacaaagtctcgctctgtctcctaggctgcagtgcagtggcgagatctcatctcactgcaacctctgccccctgggttcaagagattctcctttctcagcctcctgattagctgggactacacgcgggtgccaccacgcctgactaatttttgtatttttagtagagacagggtttcgtcatgttggccaggctggtctcgaactcctgaccttgtgatccgccctcctccacctcccaaagtgccgagattacaggcctgagccaccacgcctggcctacacacttcctttatatcagagtggttttcaaatcatcagcatcttccattcttacctgtatctgtttgtgctcttatcaatcaactcaacatccacatttccttcaggccccagaaactgacgatttttataatcttcttcgatctcaaaacagactttagaagcataagaggaaactatttgattctcttctgagcaaatgtctcctgaaaagaaaatactagacatgtaagaggtaaagggttggaagaggcatggcctgaaggactcctggaggctgaattgcacaggtgctgttgggatacagatatcgaatgagagctgagagtgaccagaatatgcagtttcgcttctttgaatccagacaaagaaaggcacaagaatgttccttgtcatgactaaacgtatacaccaaattccataagactttctgggaagccaggctggacagctttggtgggaggcaccatttgctgaggactggaaccaatgcacctacatttctactggtccgaaatagcagaagacactttctgctggtgaggaaagtccaggtcagaaaagtatcgaactccaaagatgcagaggcgaaagagcgtgcatccttcctaggccctgctgctgtccccagccaccaggaccacccactgactcccctgagcatttccatgccccagcagtgacaggcttacatgtccccatttaaactgcacagtgcactgtggcaaaggtaagggaaagcactcctgatctgcacaaaagactctaaattgtcttcttcacataaaatcacagaacatttccatcaatccacacgcccttcactcctctccctattagcccattacctgaatcttgtccctctgaagattcctgctcttctgatacactggaggttgggatccccatgttacaaaaagatgaaaaacatcaagaatcagttgatgaagatgaagacgatgttattgaaaactagagctgcactgtcccgtagagtagccgctacccggatatgctatttaaatttgtatgaattaaacttaggtaaactttagtttctcagttgcactatccatatttcaagtgctcaacagctacatatcactcacggctataacactgtgtagcagagaatggaacactcccgtcatcacagaaagttctcttagactgggcggatctagactatcaagaaatagaagacattttgaatgaagatatttttatccacatttataaataatagagataacacactcccttgagccaaatgtgtcttgacatctctccttcttctctttgtattatgcccacgttcaatgtggacacagccagattctctggcttaaattgattgctccgattggtatcatacgatgtcggaatcaaagactgaagcagtaattcaccaatgcgtaaaatgtatgcatttatattccaaggtaattccaaacttgaccacacctgggaagctttaaaaaccacccaataccaggtcacagcccacatcaattgaatcagaagtctggaggtggcaccaaagcatcggcgctttcaaagcctcacaggtgattccaatattagccaatatgggttctatgacatacagcgtgagccaatggttcgtcatgcctctggagagaaacctgccctaacacaggtgataccttctggagcaaggcaaccaactccatcaaattctctgcctttgatccattccttgagatatctgtttatttcgacgtgaaagagaccagcagagaaactgacacgtggattaggtttaaaaagaacaggtacctagagaagtgggatgaagagaaaggctttacagcgcttttctcggaaggattctgtgggcaagccaagcatggagagacccctgggctgacatcctaagactggttgctgtctgcggctacacattttgctatggattcgggtagctacaggcaaagcagcaagagtaaacatgccattttatattctctttcctggtgcatgtgcatgctggagtctgcctgctgaggaggggtttagaaagtgggaggaacccagcgctgaactgcagacagcgcatcccagatcatgagagctgacggttccattttcagggcttttgcaaccaagttgttcaacacaaccattagtctaaattaaatgatacaagctaacatttaaataaatcatattaaaaacaaaagtaatacatattaaaacataccaatttccagtcatttttctacacttttcagcagtctatgcccttgaggttatttatgtctcttgtatctgtgtggtgaaagcaggatgacagacttctgcatgtgttctttcaactccctcatcaggggcttcacgttggtagtttgaaatctgccatgatggggatattcaacccttggaaattggcataccctacaaatagacgcattctcccctccccggtgttaaacctcaggaccccactgtggccttcagcctcatcatcagccagtttcctagagaattaggttggttttatgtattgagtaacagcttaaccaataacccactggtcttcgattgcattgctcattgcctttttgtgtataggttctctagacacctccatggaagaaaacctcattgcttaaggtttgtttcaaaaatttctggattcattgctagtattgcataagctcattcattctcccctgagttcgatgaaaaacacccaaattcctctaattctcatgttcctctgtgatattgagacacagcgtccaatagttttccaacggaatagcttttcttacctgggaatgtcccccccagatagttgacactcaggaacagcacggaacaataatggctctgcctctgtctcatcatcttcttggaaaaaatgtgagatgtcacaaagggtctcagaaacacagggtagctccctgtataccctggaaaacaacaacagaatttttactatgaatataaggtaggtgcctgatgatagcataggctgtgcaggaagattttatgttaatagccatagactcaatattttatcttagggaagtcattcctcaggcccctacgactccatctcacctctcagactcccatgactctttcttacatctcattatgttaaatttaactggctctctgtttcccactatatgctgctctttccatcctaggaagcagacgtcagtcagttctcaacatctagcatttgccacaaacattggtttcataataggtcaacaagtatgttgacctatataaccttgctaagaattttagggaaaggatgagattcctaatttgtagtctcccttcatccataattggtgcccgagagaataggaccctaaaatgattgggattgcagggcattagtgagattgggcatgttttataagaacccatggaacagttatctcctcttctcccttctgcctgcaaatggtgagaggggttgcataaagcaacaaaaatgctcacagaaaaagaaaattatggatattgtacacactttcttttcccatcaaggatccttattcagatatggaacatgagagtcctatgctagatccttttctcttcttcatttttgaaggcttggtgctgtcctcctatggctggcaggaatcaagattgaggttaggagtgatggagtgtcctttatgccaagatattcaatggccaatatgacagccactagccacacctgcctatttacatttagttttaaattgttaaatgtgaaaatcagttcctcctttgaagtagccatatttcaagtgctcaaaagccacacgtggctcttgcctgccaccatgtaagacatgcctttgctcctcctttgacttctgccatgatggtgaggcctccccagccacgtgaaactaaaagaatttttctgggtaatggacataggcataggacgtctggcaacaaaatctgctttgaagaggactccagggaatagagatgaggtctcaggctggtcttgaattcccggccccaagaaatccttccaccttggcatcccaaagcactgggattacagtcatgagccaccgcacccagcctgagcattactgtttgatagatattcccaaatcactctccacaaaaggttacaacagtgaacacttccatcagctgaatatctgtgaaagcaattgttgagagattttgaagtaagttcaaaaccaaactgtagaaaaaaatcattgacaaaaaaggaaagcaaaaaaaaagaaagaaaataactgaggaattattactgaagacaacttttgtctaaaaaaaaaaaagaacatttgtttgcaatgtaaaatcgggtttcagctggaaaattaagcctgttaaaaacatcaacaacaagagcaaaaatcctgaatattttttcagcaattctgattaaagtatgtatgttaaaaaaagaaaaagccatgtgaggccagtggctttcacactggacaccacagacagggaacatttccatcctgggtgagaactctattggacagcattgactttagaacctctgctgtagtccagttgaccagagggtcctgccttgggctatctgccattggtttcatttctatttttatttttattttttaaattgagacagagtctggctctgttgcccaggctggagtgcagtggcatgatcttggctcactgcaacctctgcctcccgggttcaagctattctcctgcctcagcgtccccaatagctgggattacaggcatgcaccagcacacccggttaattttttatatttttggtagagacagggtttcatcatgttggccaggctggtctccaactcctgacctcaagtgaaccacccgccctggcctcccaaagtcctgggattacacctgtgagccaccgcacccagtctgggataggttttattaaacaaagtagttctttaagctctaccatccatggtccccggcgtgcagcactgcttttaaaatatcccatgttaaatgggtgcatggaccaagcaagactgaggaattcctgtcctcattagcagtgcttttcagcctgtgaaatatcaccctgaaataaaatctatacctgagttaacagtactgtatcaacatcagtttcctggtattagcaatgactgtttgtattgggtcattctggtttttttgttttttgtttttttgatggagttttgctcttgttgcccaggctagagtgcaatggcgtgatcttggctcactgcaacctctgcctcccgagttcaagcaattatcctgcctcaagcctcctgagtagctgggattacaggcatgcgccaccaagcccggctaattctgtatttttagtagagatgggggttcctccatgttggtcaggctggtttcaaactcccgacatcaggtggtccgcccctctcagcctcccaaagtgctgggattacaggagtgagacaccgcgcctggcctgtattgggtcattcttgcattgctatagaggactgtctgagactaggcaatttacaaagaaaagaggtttaattggctcatggtgctgcaggatgtacatcatgggaccagcttctgcttggtttctgggaggcctcagggacgtttaactcatggtggaaggtgaagtggaacaggcctgtcatatgatgtcagcaggagcaagacagtgaagggggaggtgccacacacttttaaagaaccagatcttgcatgaactcagagtaagaagccacttatcaccaaaggaatggtgctaaaccatttatgagggatatgcccccttgatccattcacctccctccaggccccacctccaacactccatcacatttcagcatgagatttggaagggacaaacatc[132 bp omitted]catggtgaaaccccgtatctactaaaaatacaaaaattagccaggtgtggtagtgggcacctgtaattccagctacttgggaggctgaggcaaaagaatcgcttgaaccccagaagcagaggttgtagtgagccaagatcgtgccactgcactccagcctgggcaacagagcaagacttcgtctcaaaaaaaaaagaaaaaaagtattatcgtgaggggaaacttggtgaaggctacatgggaactctgcccttctctcccaactactttatcattaatattgttattattttttttgagacaaagcctcactctgtctcccaggctggagtgcagttgcacgatctcggctcactgcaacctccgcctcccaggtttgagcaattctcctgcctcagcctcctgagtagctgggattacaggtgtgggccactatgcccagctgatttttgtatttttagtagagatggggtttcaccatgtaggccaggctggtctcaaacttttgacctcaggcgatccacctgccctcgcctcccagtgtgctgagattacaggtgtgagccactgggctcagaccttttttccctacttcttatgagatacaaactcttttgaaataaaaacttaagataacaaagaagaaaagtaacatatatactaatttttatgcaaataacctgcatgtctttgcttcttatgaatgtacataaaccaatggagcaaaattccaaatctttaattttttcccaacaaatagatgtcccttacgtatcatttgtcacacaggcctcagcctgaaaaaaaattccagtttttgtgtattgcagttcccgtatgctattgtcaaccaacagtttccgtgatccttgtagtctaatgagtttggatgcatctatgttcctactggatccactgtccctgggaaaacacaaatggaattggaatgtgagcatgtcagaggagctcgatggtgggacaatctcctcactgtgatgtagcgaaagtagcccgatccttagagatatccatccttagacatgcccatccatagagatgccatccttagagatatccatccttagacatgcccatccatagagatgccatccttagagacatccatccttagacatgcccatccatagagatgccatccttagagatactatccttagagatgccatcctcagagatgtcttagagatgcccattcttagagacaccttcttcgatgcccatgctagaataaaataccattcctccacatttttattgaactaactgcattgctgttaccacttcgtagacaatgatcttatctcaggaggcatgcctcctttgattctcaatccctgatgttcatcacggtctgtcacacttggtgatgctcgctactggcttctgaaaggatactgtgtttttgtaaactataggagcataacaagggccccactcttctatccttcgttggtcctaaacaggagggaatgttaaccagatgaagttgtttgcacaacactgaatggactgagcttatttgaaggtaggatctctttatttagtgtgagcgtgtcagggatgatggacactagagtgatctgcattcactgcctttcacagacatcactcagcagtgacagacctgtcaaagttgttgcttaacctctctgagtatcagctttctaatttgtaaaataaggatacagtactctcgtcacaaatccttgtggtgattaatcatagaaggctaaaattacttagcgcaagagttggaaacactgggttcccaaagcaaacaattcgtcctagtccgtggtcttttatgcatgccagatcatctgtctcagtcatttcagacttttttttttttttttttttgagacagagtttcactgttgtcgcccaggctggagtgcaatggagcgatcttggctcactgcaacctccacctcccaggttcaagcgattctcgtgcctcagcctcccgagtagctgggattacaagtgcccgccaccatgcccagctaatttttatatttgtagtagagatggggtttcaccatgttggccagactggtctcgaactcctgacatcaggtgatctgcccgcctccgcctcccaaagtgctcggattacaggcgtgagtcaccatgcctggccaaggttgctatttttaaaacctatggactgagaagcttgtgaacaatataaatgtatttgtcacagctctggatgctggaaagcccaggatcaaggtgctggtagatcagtgtctgctcctgattcatagagggcagacttcttgttctgtccaagcatggggaaagagaaaggagctctccagggttccttcatgagggaactaattccattcatgagggcgctacctttatcacctgacacctctcaaaggccccatctcctaacaacatcacattggaagttaggatttcaacatattaatattggaagaacacaaacattcattctgcagcagtgtctgaattgcatacatgaaatatttggtcagattaatttgttttgagttccaagacaatgtaaaacagtgcattcattttctacaaatgagacataaacctggtgctgatgaggagccactgaaacacacagagggagggcttagtgagtcaggctgcttggttctgctctgatctgggcgccatgctatgggattgtcaagagcgtggtcaaggccataggcccatgcatcaaggaaagagctggaagaacagccctagactcgcttttgctcaggtatgaagttgccatggtcagaatcaaggaaggagagagaaggtctaaaaaggtcagaaacagggaa[212 bp omitted]gaggcagaagaatcgcttgaacccaggaggcagaggttgtagtgagctgagatggtaccagcgcactctggcctgggcaacaaaacaagactctgtgtcaaaaaaaaaaaaaaagtacacctgggtgcccatgggagttttcccttcattcatgcagagatgggtgaatgaataaaatgtgagcagaacctttcttccagaaaacatccatggtcctctgtatctcatgaactataacgaaacacagaagaatcagccatcaggagccctcacagagcgcaaagtcactcaccgtctcggcagctcttcctcactgctgctactcttttctggacactcctttttttccatttgtcaaatgtggtatttatgtctttactgtatcttttttaccctgaaaaaataaaaggaggttgtatttaggtacttgggaagaaccatcagataaatcttagcttctgtgtctctcaaaggttgacaaaagcgcttattgctcattcacaagagatgcatcagtggaattgctcctagtagtggtaggtacttgggacagaggccgaaacaggagagttgtaaaacagaaactagaaacttcctttttttttagatggagtctagctctgtcacccaggctggagtgcaatggcgagatcttgactcacagcaacctccacctcccgggttcaagcgattctcctgcctcagcctcctgagtagctgggattacaggcatgcgccaccatacccggctaatttttctatttttagtatagacagggtttctccatgttggtcaggctggtctcaaactcccaacctcaggtgatcggcccgtctcggcctcccaaagtgccggattgcaggcgtgagccaccgtgccctgccggatttttcaaattcttttatttttgatgtggccctgggtctgcaagttaagttatgcagaacaggaacttctaaagattccaacctgacagaggcaaaagtgtgattattttccttgccttccattcttctctcgtacaactctaatcgtttttcttgcctaaattgtcaccttgatttctttaaaatacttgggtttaggaaccgttgtctaatccattaccttcaccggctctgctatgacattttttaaagattagatttttaaaataatggctttatggatatatagttcacaaaccacacaattcacccacataagtctacaattcaatgttgtatatatagtaatgaagttgtacaaccaccaccacaatcagttttaggacagcgtcatcacctcaaaaagaaactcattaagcggcactccccattccccacaggcacgcacacccagccacaggcacccacgcatccaccttctgtctccataggttgactcattctggacatttgatttaataggagttgttatggaccgaatgtatgtgtccaccctcaagttcatgtgttgaaatcctaactccaaatgtgatgataggaggagatggggccttcgggaggtgatgaggtcatgagggtggaatcctcatgaatggtctcaacgcccttagcaaagagaccccagagacctcgctcccgctttctaccgtgggagggcgcagcaagaagtcagccgtctatgaacaaggaagcaggtcctctccaggcactgaatgtaccagtgccttgatcgtggacttcccagcctccagaactgtgagaaataaattctgttgtttaagccacatagtctatgatacttttgttaaagaagcccaaagtgactaagacaggcatcaaacaatatattgtcctttgtgatggattctttcacttcccgtatgttttcaaggtccatccatattataccgcataacagcacctcctttgctttcatggctgaataatattccaccgtatggagacatcacatattctcttatccattcagcagacgatagacatttgggtgagttccactttggggctgttatgaaaaatgatactgtgaatattcaggtacgaatttccatgtggacagattatttccttctcttgggtacatacttaggagtggagttgctgggtcatatggtaactctatgtttacccttcaaggaactgccagactgttttccaaagcgccaatttccgtgctcgcttcggcagcacatataccaaagcgccaatctccattcccaccagcagtgtaggagggggccagcttctccatatcctcacctataattgttattatgggccttttgaaaatggccattctagtacatgtaaagtgataagttattgtgatttttgaagattaacttttatataataataaaaatacatattattaatagcatttcagagactctggataacagaaaagataattagtgaaatacaaatcattaatttgtaattagtcaccaggctgctccacctcccaggttcaagcgattttcctgcctc[135 bp omitted]agcctctcaaagtgctgggattacagacgtgagccattgcccctggcccagagaaataatctaaagatttgaattccaaaaccctatacaaatgttttattttaccaccactgaatttatctgcaataactgaatgtctatttatatgcataataatcactcacaggttccaactaaacaaatatttctatccaattttcaataaaaatattaaaatctgcatatttaatttattcatgtttaattattatgcttctcacagcctgcgaaaaatttaatttagctatcctctgaactacaagcttttcctttgttataacgaacacttttcttttacttaagtatcgttattccagagttaatatagtatgcattcaaattacttcttatttagtattattttacctagtaccattatatatttaattttttctcatgaagccaggcacagtggtttgtgcctgtagtcccagctactcaggaggctgaagtgacaggatcccttgatcccaggagattaaggtcgcagtgagctatgatggcgccgctgcattccagtctgggcgacaaagcaatacctcatttcaagaaacgaaatggaattttttccttataagaatcttaaagaaggtgtacattatcttggctaactttctataggattaagtagaagttattgagacttggtctacagtcttctttttttcatgagtcaaaaagcatctctcactttagttacacctgtattaggagagttatgatcaattacagcagttgtagtttctgagaacttggataaatacaaacctgaattacacagaatttatgtaaatccagatattcaaaaatgagaaataatgtaatatatgaccaaagtaatatcaagacaacatacaattaaatcactcaacaattactgggaatatgtatcaaggcaagaattgtaaaattctacctggtacttctgaaatgaacaaggcaatgagaaataacagtttatcttgtctattactgagtatcaatgaaagcaataaggtgaacggaaaagtccatgaaaactccattttcagaataatgaggagacagatttaattcacagatccaaatgtttctcaccggctgacaaaactgtgttaagtcagggtgaagcatggcggaggaacagggaggaagtgcagagtgagaaaacataaagaagtcaggaagtgccagaggagtaatttcctgtgagtaaagcctcatactcggtgatttatctatagagtttgaatacaagagctgtgaggtctgggcaggtagagtggaggctgagcaggagataaatgtggtagaggcggtgtggatccttgaaaacagagaaatgccctaatgtgacagagtacagaaatactacaaaaacacacttgtagaaagaacattctgcatataatcaggcatggaacggtcccatgcattccataataattaagaaaaagatattaccagagcattgcttaaaggcactacaagaaaataggtgagaagaccaggaagttgttgttttttgttttgttttgttttagataaagaacaatcaaaggaaaatgatggacccaagttaacaatcactcttggggggaaaaaaactccacccacaattcctaagtaaaaaggattacacacattctcggcataatatgtctctctcaggccaaaggataaccttgtgcttcatgtggacactatgaaatcattccagctgaagtcaggaaaataccaagaccttccctatttaagttaaaatatcggaagcttattccaaaatattggacaaattccaaatacagtgattgaaaggaaggagattaaactataactcactacacgttattttcctctatagagaaacataacgaatcacctgaaataagctacaaaagtaagataaaccagtaagttagagaaagaatctttttttttctttgagacggggcctccctctgtcgctcaggctgtagagaagtggcacaatctcggctcactgcaacctctgcatcctgggttcaagtgattctcctgccttagcctcccaagtagctgcgattacagacatgcaccaccatgcctggctaattttttttgtatttttagtagagatggggtttcaccatgttggataggctggtctcaaacttctgacctcaggtgatccgcccacctcagcctcccaaagtgctgggattacaggtgtcagccaccgcaccagccagaagaatcttaatatacaaaagtgaatagcttcttaatataacagactatcccaattccatgaaagaagaaaatacactcattaaaatagcaactatggtacctagaactaaactatacaaaaaaactacatgacccatataatgcttttattttgaaataattttaaacattgaaaaatagcaaagattcacataaatcctcaaccagcttatctgaatgttagctatatataattgtattatatataaaataattgttatatataaaataactaatttattgtattgtatattgtattatatatacatttattgtattatatataaataattgcatatctacatttaatatattatatataatatacaattgtatatgcaattgtaatatgataattacatatataatagtatatataatacaattatccaaccaggaaattgatgttagcatatcataccattacttaatgtgcagaccttatttgaattttatcaacatttgtctgaatgtcctctttgttctccaagatctaatcgaggatctcacattgcacttacttgttatccctccttagattcctccagtctgtgaccgtttcttattcttcccttgtcttttgtgattgtgacatttttgcggaacatggtcaactattttacagaatgtttatcaatttggatttctttgatgttttctcacgattaggctgaggtcatgcatgtttgtcttctgtgttcagtcaacatgccccgtcctttttggaatatttcttcatgttctggagtcacaatttgttccaatgttatcctatatactcctgccccagccctggaagtaaccacttctccacggatccttggctcccttgtattcaaaaacagtatttagaaaccaagatctggaaactatgtgtgtttacagctactaagatatctttgtcctaatctctctcagtggaaagacctggggaatccatgcatgtataccgaactgtgcctacacatgcctgtatttacttctcgatagatagactgacaaacagatagacaaatagagcagagcaaagagctattctgatacatgaaatagaaaatcaataataaaaaaaaacattgctctagaaataggtagacaaaggatatgaacatgaaattcacagaaatggaaaaataaatggttcccaagcacgtgctgaatgaaaaaacaccatgctgaatgaagattaaagctactcttgaatattttttctccatgaatttggaaatcatgcgaaagtctgaaaactcatctactgacaaggctgtgggaaatctgacattctgatattgctgatgggagtgtcacctgctattcattatatggatggcaactttatggacatctttgaacgcataaatgacatcccatttggaatggtaaatcaattttgaggaattgatatactcctatacaaatatacttacctatgtatgaactcatgctcacatgtttactcactgtggcactcttcataaatacaattgaggccaggcgctatggctcaagcctgtaatcaccacaccttgagaggccaagccgggtagatcacttgaggtcaggagttcgagaccagcctggccaacaaggtgaaaccccgtctctacgaaaaatacaaaaattacctgggtgtggtggcatgggcctgtaatttcagctactcgggagggtgaggcaggagaatcgcttgaaccaagaagtcataggttgcagtgagccaaaatggtgccactgcactccagcctgggtgacacagcaagactccatctcaaaaattaaaagtaaaataaaataaactaaaatttgaaacaactgaaatgtttttcaataggggaatgaataaagacatcatgatacatccgatgatgaaataatatgcaattttaaaagaatgtcaaagttcactaaaaactgatactgaattatcactaagatctattgttaatgaagaaaggcatagtaaacaacatgtaaactttctactcttcaagtaaagagtaaaaatttgtatatgcataaagaaactctggatatatatatatacagtaacaccacagtacatattcaactgtgtttggggagcagactatgtgaatttattaccctttataaagtaaacaaatggtttaaaaacctccacctaaaattttcacacgcaaaattttatatatatatactatactttcatgacactatgttattgtatatatatatatatatatatacacacacacacaatgcttccatttgttttgatgtcacacaagcaaaattaaattacactaaattttaaattttaacattaaaatacacatgatttttaccatttgtgatacacattgtatcatatgtattctcaattgaaatttcaattaaaattcagttaccactcatcaaattttactatgactatttcaactgaaaacattttcatattgcatttaaaaagttttgacggtttacttttattttagaaatcaaattatttcatgaaaaccaaatactcttcaccttaaattgtcttttttactcccatgaaaatctgtattcatcttcacaagaaaaaaatgcaaaattacattctttaaagttcaaatactaaaattcttgtatagtattttatgtgacattggaaattttaaaaaacatgtaataaaaatcccagtcacgcatgaagttatagccttgcctgcacgtattgcctgtagccccagccacccggaggccgaggtgggaggatcacttgggtccaaatggctgagaccagtctgtgccacacagcgaagccctgtcatttaaaaaaaattcctaaacttccaaaaattggaataaaattcattattccttgacatattgaagaaacaaacaacagagaaatgaattaatgatataaataaggaatcaaaaggataaaacacaaatgtcctgaaaagatgttaaaattcactagtaatcaggggaatgtgcatgacaaccactatcagttatcattctcacccacaatactgatggaaataagaaaagctgacaaaatcaagtgtgaatatgaatgtgtagcaatggaaactcgtaaaccagtagtggagatgactgaaaacacagccgctttggagaataaactggctgtatctagacttcaagacacacctacccttgaaattatgtgtggacaagaaaatgcatataaaaagtccattgtattatggtttgctatcagaaaacagggtaacaaactgaatgtccatcatcaaagaatggatacattgattataatatcatcattgcattaatactgtagcgcagttaacataaattattaaaaccacatgtaaacatggataaatatttaaaatgtactattgggccgggcacggtggctcacgcctgtaatcccaacactttgggaggccgaggcgggcggatcacctgagatcaggagttcgaagccagactggcaacatagtgaaactccgtctctactaaaaatacaaaaattagtcgtgcgtggtggcgggcgcctgtcaccccagctactcgggaggctgaggcagaagaatcgcttgaacccgagaggtggaggttgcagtgagccgagatcacaccactggactccagcctggatgacagaacgagactccgtctcaaaaaaaaaaaaaagtaatattgattaaaaatcaaattgcatgagactgcacagcacgataccaagcaaatacaagttttaaatattacagaaaataatatttaaaatacaaaccaaatacataaatcatgcagggggattaagacgtttctggatagtggcaacagccgagagtggctggatgaatttcagagaaatttcatatattgcttcaattttatttaaaatatattattacctatgttttagatattttattgtaaataatgggcaaggatattataaactctgcagaagtaagtgtagtcgtgttttttcctactcacattgaagatggcccagatgcttgcactaaccgcgtttaccgcccacagccatcatggcgaccggaagtcctgagagcttgtttccctcgaatctcagacagccctccttctctatgaacattatttcaaaagaagttgagaactagagaaaccgaagcttaaggggattctcccatttggcctgtcctcccctaaagtcaccacctgctgcgtttctgcagcgcttaccatgtgagtttcaggagccccagggtgcaggaaggaggagcggaggcttgttgcttggacactgccaggctgctctgtgttctgttcctcttggtcacttgagaagaaagggagaagttcctatgaggctgtcggaaagggaaatggggccctccgcttgttgaaaacaaaacaaaaccctcaggaagctttgcatcctgttagtcatagcttaaatttatgacttcaatgacttggctgggacagtcttaatctctccatactcaagttgttttaatttctgtaataataatttttataccaatgtttgtgttgttaatactaataattttacattgtaactgtaatcctttaattattacaagtgttaacctaaataacaaacatatgaaagcttcctaaaggaaacagtgtttatttgggaatagagcattgcaattgggaatagatatgccatattaaactatgtatatattcaggaagataaaggaagacagaaatggggaggattgcatattgttttgacaggattttccttggccacaggatcaggcacaaaggtgacattagtctgaggttggacaggcagttgctgggcagcattccttgcagaaatattttttgtttaaggttgcaatgacctttatgcaaggttgtgggttttgtagagtctttttcattttcaagcatacaaggataagaccccccctcttcatggctttcctggctttatttgtcagggtcatcttaacattagtggctccattttgttctgacaactttcagatttctccttgtgatcaagaactttctctaaaagcattattgatcaatcattctgtaattaagatttgatgtcccctgatgccagcatggacctctcccagtttgctggtctcatcccatgttgtggggagtgactggtgactaggaatcgatgtcaaaagcacatttgagcaacaaaagagatttgaaggatgtggctctcaggctaagtctccctggagtccattagtaagttcaattttgtctgttctacagtcttttgctatccctttaaagtgctgattcagtattattttgttaggagctgcacctctgaaaaaatttaacaagtaacacatacaaagtttaaaaaggagaaatacaaagtaaggggaaatacaaattaagagcaatatgagattttcagtttgcatatggttttgagccataaacctaggtttaaagacaactaattgaagaactcaaacagttattcgagacagcagggagttaggtgagacctggggtaaccacatggcctgctttcttattttgtgtataggagcctcaacttttctcagaggaatttattcaggtatagcatgtcgtattagcaacatcacagacaatttcttgcttaaccaatggatactaaagaattttgtaggttgggttctgttaagttataagcagaaggaattgatcataaaatttaagttacaccattattctgctaagtagaaaaggtcgaattaagtgagatgaaagtctcattatgatatagagtcttgtttcagcatcttgcagaaagttatacagtgtgaaaacaccaactttttctcctggtttgtagtgtgaacgtctctggttatgatattgggcagtttggtaaactattgtgtgatccgcatatcagccttgaggtttgttccctctttcattttcctctggatcaccaacatgctaatctacgttcacatcactgaaaccgtagaggccaataccaatttcaccatttctggtcctggatatttgcaagactgttgtcaaactaggccatacatacaataatttaatatacatttggggcttggattatatttctgttaaattgcactgctctatgggacttattttattcattccacaaatatattttgcacatgttccttattcttggtactatttaatggatttggcatacatccgtgatctaaacagataaaactcccccaaggatcatttataaatgtcatggtgattcgccatgtcctgtttgtgttcctcatggtctggaccagcatcaacatggccagtctcctctgcagacaccggcggagagcccagcgtctgcacagccctagcctctcttcccagccatctcctgaacacagagccacccataccatcctcctgctgcttggttgctttgtgtgcttttattgctcaaacaacttcatcactctttatttcttttataaatctgagaaaaaatcaagactagagatgatcactggaattatttcatcatgctacccaaccatctgcccttttgtgctaataaaaaataataaaattatttcctaatttacctcttcctctctaagacaagaatgatcagctctcagggagcattcaatggctgatctcaaaccccatactttcttctgcagctgggaagtctccatgatgacttttgtggagaaaaagtcatgcagttattgagcaattgaattagggctagtttgaattgaggtgtatcataaatttaaaaagcattcaggttttgaagtcaatataaataacagtatataaatattatcttaataactttcacattgctgacaagtttaaattatgacattttgggtaaaacgtatgtatatgttttgttatgtttacatatatatgcatatttaaataaaatacatatacacaaatatgtaagtaaaacatatgtaagaatatatataatatatataattttttttttttgagacagagtcttgctctgtcacccaggctggagtatgcagtggtgtgatctcagctcactgcggcccccacctcctggattcaagcaatcctcccacttcagccttccgagtagctaggattataggtgtgcaccaccatgcctggctaatttttttgtattttttagtagagacagagtttccccacgttggccaggctggtctagaactcctgacctcaagtgaaccgcctgtgtcagcctccaaaagtgctaggattgtaggtgtgagccaccgcactggccttatcagtatatacacacacacacacacacacacacacacatatgtgtatacatatacaactacataggtatttttaaactaactgtatctgcttgtttttgcttttttaaatgcagttgctagaaaatttaatatacatttggggcttggattatatttctgttaaactgcactgctctatggcacttcttgtattcattccacaaatacattttgcacatgttccttattcttggtactatttaatgggttggacatacatccatgatctaaacagataaaacataatagcacaagagattatacagaatgtttgtggtacaggaaaacgtatatgtacacatgataggagctaaaaagaataggactggttaagagaatgtggtgtgtgagagtacaggtgcagggagctgcagtgactgggattacaggtatgcatcaccatgcctggctaatttttgtatttttgtagagacggggtttcaccaatttggccaggctggtctcgaactcctggcctcacgtgatccacctgcctcagcctcccaaagtgctgtaattacaggtgtgagccaccgtgcctggccaacatttatcattttaaatactcatctgcaaaaatgtttccaagtggggccacttccccacccctcatatgacagtggcagtgatataccatatacatggttattaaaaagaatctggagcaacaatatgaatgtcagacaaattaggcttcaagagcatttccctccatcttacaggggataaacccaaagaagttatattaagattccaataaaagaatgcaagatgactatctgtgtaaaaatgtaatcaatggggagcaggtgcacctccaataatattagacaaaatatattttacctaaacagcattactaagtataaagtagatcacttcaataagaataacaattttaattttgtgtatacatattcacactttcaatatgtatatagtatacacgggtagaatgataaacagatatagaataatcctccactcttgtgggaaatctgttcaatagtctttcagcaattaacagaataacagagtatcagtaaagatataaaaaattgaccaaagcaattcatattcttgacttaagtgccctagaataacaactcacacagccattgaagaatccccatcatcctatctcaagcatagaggaaacacatagcatacatatgtagccacatagcaaacacagaaatgactatcaacaaagtggaagagtttaatgcacagattaagttatctgaatatatgtacaatgagttataaataataaataattgagccaggtgaagtagtacatgcctgtaatcccacctacttgggaggctgaggtaggagtttgagcccaggagtttgagtctggtctgggcagcattgcaagatcccatcccccaaataataaataaactaactaagtaatcaataattgaatgagaaaagttagctcatatttcaatatgttcaatcttaggatatatacttctaggcaaccacttagtgacaaaaattctgtagaaatccatcattgaaagttcattatgtaaataaatgtgaagactagataagaaccacagaacacaatgacattggaaaaaatgccacagtaattctttgaaaaaagaaatgcaggcctggtgcggtggctcatccctgtaatcccagcactttgggaggccgaagtgggcagatcacaagtcaggggttcgagaccagcctggccaacatagtgaaaccccgtctctactaaaaacacaaaaacaattagctgggtgtggtggtgggcacctgtagtcgcagctactcgggaggctgaggcaggagagtgctttcagagaaacttcttgatcacaaggggaaatctgaaagttgtcagaacaaaatggagtcacttatgttaagataaccctgacaaatagagccaggaaggccatgaagagagggctcttatccttgcatgcctgaagatgaaaaagactctacaaaacccacaaccttacataaaggtcttcacaaccttaaaaaaatatatatttctgcaaggaatgctgcccagcaactgctggtccaacctaggactaatgtcacccttgttactgatctttgtagccaaggaaaattctgttaaaacaatatgcaatcctccccatttctgtcttcctttatctccctgaatatacacatagtttaatacggcatgtctattcccaattgcaatgctctattcccaaataaacattgtttccggctgggcgcagtggctcacgcctgtaatcccaacactttgggaggccaaggcgggctgatctcgaggtcaagagacggagaccatcctggccaacatggtgaaaccccgtctctactaaaaaataaaaaattagctggatgtggtggtgcacgcctgtagtcccagctacttgggagactgaggcacgagaatcgcttgaacctgggaggcagaggttgcagtgagccaagatcatgccactgtactccagcctagccacagagcgagactccatctcaaaaagaaaaaaaaattgtttcccttaggaagctttcatatgtttgttagttaggttaacacttctaataattaaagttatacagttacagtgtaaaattattagtattaacaacataaacattggtataaaaattattattacagaaattaaaacaaattgagtgtgagagagattattaagactgtccaagccaagtcactgaagtcataaatttaagttatgacaggatgccgagcttccagagggttttgtttttaacaagggaggggccctatttccccttctgacacgctcatatgaacttctcactttgtcgtactccttccttgctgactaagaggaacagaacacagagcagcctggcggtgtcctaccaacaagcctccgtttctccttcctgtacactagggctcctgaaactcacctggtaagcgctccagaaaagcagcaggtggtgactttagggtaggacgggccaaatgggagaatccccttaggtcggtttctctggttctcaacttcttttgaaataacgctcgcagaggaggtgggctttctgagaactgagggaagtaagctctcaggacttccggtcgccatgatggctgtgggcagtcaatggggtcagtgcaagcatctgggccatctttaatgtgggcaggaaaaaaacacgattacacttacttctgcagagtttataatatccttgttcattatttaaaataaaatatctaagacataggtaatagtatattttaaataaaattgaagcaatatatgaaatttctctggaattcatccagccactctcagctgttaccactatccagaaacgtcttaatccgcctgcatgatttatgtatttggtttgtattttaaatatcattttctgtaatatttaaaagttgtatttgcttggtatcctgctatgcattctcatgcaatttgatttttaatcaatattacttttttttttttttgagatgaagtctccgtctgtcacccaggctggagtgtaatggagcaatctcggctcactgcaacctctgcctcccaggttcaagcgattctcttgcctcagcctcccgagtagctggaattataggtgcatgccaccacgctcggctaattttttgtatttttagtaaagacgga[145 bp omitted]tggttacttcgagggctggggcaggaatatataagataacattggaacaaattctgacgccagaacatgaagaaatatttgaaaaaggatggggcatattgactgaacacagaagacaaacatgcatgacctcagcctaatcgtgagaaaacatcaaagaaatccaaattgataaacattctgtaaaataattggccatgctcagcaaaagtgtcacaatcacaaaagacaagggaagaataagaaacggtcacagcctggaggaatctaaggacataacaactgagtgcaatgtgagatcctcgattcgatcttggagaagaaagaggacgttaagagaaatattgacaaaattcaaataaggtctgcacattaggtaatggtaagatacgttgacatcaatttcctggttggatacttgtattacatatactattatgtatataattattatattacaattacatatacagttgtatattatatataatacaataaatgtatatatatgattataatacaataaatgtatatatacagttttatatataacaactattatacatataatacaattatatatatagctaacatcaggataggctggttgaggatttatatgaatctttgctaattttgcatgtttaaaattatttcaacataaaaaaattatatgggtcatgtagttttttgtgcagtttaattctaggcaccatagtttctgttttaatgggtgtattttcttctttcaaggaattgggatagtctgttgtattaaaaacctattcatttttgtacattaagattcttctggccaggcgcaatggctcaagcctataatcccagcacttgggaacctgaggcaggcagatcacctgaggtcaggagttcaagaccagcatgtccaacatggtgaaaccccatctctactaaaaatacaaaaaaaattagccaggcatggtggcacatgcctgtaatcccagctacttgggaggctgaggaggagactcactagaactcaggaagcagaggttgcagtgagccaagactgcgccactgcactctggcctaagcaacagagggagactccatctcaaaaaaaaaaaaagattatttctctaacttactggtttatcttttatagcttatttcaggtgatttgttgtgtttgtctatagagtaaaataacatgtctaatgagttataatttaatgtccttccattcaatcactgtatttcaaatttattccaatattttggaataagcttccaatattttaacttaaatagggaaggtcatacttggtattttcctgacctcagctggaatgccttcatagtgttcacatgaacacatttggcctgagagagacttattatgccgagaatgtgtgtaaccctttttacttaggaattgtgggtggagtttttccccccgcccaagaatgattgttaatttccgtccatcattttcctttgattgttcttcatctcgaaaacaaataataaaataataaaataaataaataaaacttactggtcttctcacctattttcttgcagtgcctttaagcaatgctctgccaatatctttttcttaattattatggaatgcatgggaccgttccatgcctgattatatgcagaatgttctttctacaagtgagtttttgtagtatttctgtactctgccatactagggcatttctctgttttcaaggatctcccaaccacaccgcctctaccacatttatctcctgctcagcctccactccaactgcccagacctcacagctcttgtattcaaactctatcgataaatcaccgagtatgaggctttactcacaggaaattactcttctggcacttcctgacttctttatgttttctcactctgcacttcctccctgttcctccgctatgcttcaccctgacttaacacagttttgtcagccagtgagaaacatgtggatctgtgaattctatctgtctcctcgttattctgaaaatggagtttgcatggacttttccgttcaccttattgctttcattgatactcagtaatagacaagataaactgttatttctcattgccttgttcatttcagaagtaccaggtagaattttacaattcttgccttgatacatattcccagtaattgttgagtgatttaattgtatgttgtcttgatattactttggtcatatattacattatttctcatttttgaatatctggatttacataaattctgtgtaattcaggtttgtatttatccaagttctcagaaactacaactgctgtaattgatcataactctcctaatacaggtgtaactaaagtgagagatgctttttgactcatgaaaaaaagaagactgtagaccaagtctcaataacttccacttaatcctatagaaagttagccaagataatgtacaccttctttaagattcttataaggaaaagattccattttgtttcttgaaatgaggtattgctttgtcgcccagactggaatgcagcggtgccatcatagctcactgcgaccttaaactcctgggctcaagggatcctctcacttcagcctcccgagtagctgggactacaggcacaaaccactgtgcctggcttcatgagaaaaaattaaatatataatggtactaggtaaaataatactaaataagaagtaatttgaatgcatactatattaactctggaataacgatacttaagtaaaagaaaagtgttcgttacaacaaagggaagcttgtagttcagaggatagctaaattaaatttgttgcaggctgtgagagacataacaaacataaacacatgaaatatgtagatttttatatttttattgaaaattggatagaaatatttggtttgttcagttggaacatgtgagttgattattatgcatataaataaacagacattcagtgtaggggccagccctacagggtctgtgggtctttctcccgttgtgcggagacgagagatcgtagaaataaagacacaagacagagaaatagaagaaaagacaactgggcccgggggaccactaccaccaagatgcggagaccagcagtggccccgaatgcctggctgtgctgatatttattggatacaaggcaaaaggggcagggtaaggagtgtgagtcatctctaatgattgataaggtcacatgagtcacgtttccaccggacagggggcccctccctgtttggcagccctggtggagagagagaggagacagcttatgccattatttctgcatttcagagacttttagtacttttactaattctgctactgctatctagagggcggagccaggtgtacagagtggaacatgaaagtgaaacaggagcgtgaccgctgaagcacagcatcacagggagccggttaggcctccggataactgcgggcgggcctgactgatgtcaggccttccacaagagacggtggagcagagtcttctctaactcccccggggaaagagagactccctttcctggcccactaagtaacgggtgccttttctaggcactgacgctaccgctagaccaaggtccgctaagtaacaggtgccttcccagacgccggcattaccgctagaccagggagccctctagtggccatgtctgggtgtgacagaaggctcgcactctcgtcttctagtcacttctcaccgtgccccttcagctcctatctctgtatggcctggtttttcctaggttatgattgtagagcgaggattattataacattggaataaagggtaattgctacaaactaatgattaatgatattcatatataatcatatctatgatctagatctagtataactattcttattttctatattttctttattatactggaacagctcgtgccctcggtctctcgcctcggcacctgggtggctttccgccccacaactcaggtgttgcagataaattcattggtggtaaaataaaacgtttgtatagggttttggaattcaaatctttaaaatcacttctctgaatttccattagatgattattgctaccaataaaattttagtaggtaaacacaaccaccttctaagaacttagaactctcagactgggcacgatggctcacgtctgtaatcccagaactttgggaggccaaggcaggcagatcacctgaggtcgggagttcaagaccagcctgagcaacatggagaaaccctgtctctactaaaaatacaaaattagccaggtgtggtggcgcatgcctgtaatcccagctactcaggaggctgagacgggagaattgcttgaacctgagatcgcgccattgcactccagcttggcaacaagagagaaactccgtctaaaaaaaacaaaaaagaacttagaactctccaatattaaatggccagttccctcagaataaaaacaaaccaaaatattgcaaccaaagtgaactttgaataattaattcaattgttacactttcttcttaagttgtgaagaacttcaaaatgacgtgactatataacaatagtgagatgcaaacaaagaacaaaaactaccacaaaagaaattgtgaatttcattcagcagctttactgttagtcttaatatggtgcttattaggagttggttttgcattgctcagtagcagagatataattacagcttgttttatgtggtaatataatataaaagtataccctctctagccttgtctactgacagaattacgtgcaatgtcacagcaagagcctgatgtatctgcccagaattcttgttttgatctgtaaatctctaatagtaattgtgaagagctcaactcagtatggaaactgatctggtcacgcattttttttcagcatcttaaataaacagcacagagtctgaggccacactatgctggacacactgtaatcgcacaaacaaaattgtagggctttgttccaagatggtgttaagacttgatctatggataagatcaacttgtgggtgattcagaggtgcacccactagttccctgcaaccagaaatggtaaacctacttgtctgtttaaagatgcttgaaacaatattgcagagagaggatggtgagacagtggagtgctgtatgatggtgagtgttaaacacaatttgatttattaaaattaagttgcattccttggatacaaatagttcgttttaaaaaataggcagagtattacactattttttttatttattttttgttctgaagacagagtctcactctgtcacccaggctggagtgcagtggcaagatctcagctcactgcaacctccgcctcctgggttcaagcaattctcctatctcagcctctggagtagctggaattacaggcgtgcaccaccatgcccggctaatttttgtatttttagtagagatggggtttcgccatgctgaccaggcaagtctggaactcccgggctcaggctatccacctgcctcagcctcccaacatgctgagattacaggcctgagccaccgtgcccggtcaccccattttaatatatttaataaaaccaaatagtcaaaaagttaagatggattatttatgggtgtttggattttgagcaatttgtaattcactaattttcttttctgttatccaaagtgtctacaatgctattaataatatctatttttaccactatataaaaattaatcttcaaaaattacaataagatatcactttacacgtactagaatggccatttttaaaaggcccataataacaattataggtgaggatatggagaagctggccccctcctacactgctggtgggaatggaaattggcgctttggaaaacagtctggcagttccttgaagggtaaacatagagttaccatatgacccagcaactccactcctaagtatgcacccaagagaaggaaataatctgtccacatggaaattcgtacctgaatattcacagtatcatttttcataacagccccaaagtggaactcacccaaatgtctatcgtctgctgaatggacagagaatacgtggtgtctccatacggtggaatattattcagccatgaaagcaaaggaggtgctgttatgtggtataaaatggatagaccttgaaaacattatgcaaagtgaaaggatccatcacaaaggacaatatattgtttgatgcctgtcttagtcactttgggcttctttaacaaaagtatcatagaccatgtagcttaaacaacagaatttattgtcatagttctggaggctgggaagtccaagatcaaggcactggtacattcagtgcctggagaggacctgcttccttgttcatagacggctgacttcttgctgcattctcccacagtagaaagcgggagcgaggtctctggggtctcttttctaagggcgttgagaccattcatgaggattccaccctcatgacctcatcacctcccgaaggccccatctcctcctatcatcatatttggagttaggatttcaacacgtgaacctgagggtggacacatacattcagtccataacaactcctattaaatcaaacgtcagaatgagtaaacctatggagacagaaggtggatgcgtgggtgcctgtggctgggtgtgcgtgcctgtggggaacggggagtgccacttaatgagtttctttttgaggtgatgacgctgtcctaaaactgagtgtggtggtggttgtacaacttcataactatactatatatacaacattgaattgtatagtttaagtgggtgaattgtgtggtttgtgaactatatatccataaagccattattttaaaaatctaatctttaaaaaatgtcatagcagagccggtgaaggtaatggattagacaacggtccctaaacccaagtattttaaagaaatcaaggtgacaatttaggcaagaaaaatgattagagttgtacgagagaagaatggaaggcaaggaaaataatcaccatttcacttccaaaagtccttttcggaagatagccttttaattaattttaacacaaagtgtacaaaatatattagtttactaactctagttttgtcttatattgacaaactctttaatatctagatactagatattataaaattaggacccatttgtccagtacctacacaacatatacagtgtagcaaagttaaatgaaatgcaggctgggcacggtggctcatgcctataatcccaatactttgggaggctgaggctggcggataacctgaggttgggagtacgagaccagcctgaccaatatggagaaaccccgtctctactaaaaatacaaaattagccgggcgtggtggcccatgcctgtaatcccagctacttggaaagctgaggcacgagaattggttgaacccaggtagcggagg[133 bp omitted]tctcctaatgtcatctccagattaattttttaaatcacccagggcagcaatctgcaatgtcctctggatctgtgtaaactcttgtgtggcaaatgactgaaagttcaacttcaatgcagtaaaaatataaagagagtgtcctggctccgttgaatgcaaggacagaaggtaggactgaccctagggaggctgatccatgagctccaaaaacaccacagggaaggaacgtttctccaggtgtccaccttgccttccatggtgttggctccacacaatattcacatgaagcttcacatctcacaagagacaaaagggagaagagcaagggcagcctctgatccctcccaatgaggagaagtctcctcgggatgtcacaatgtctcgcaagcccatttcccagccagcttatgtttccaggaagtcagggaacagattaaattttcaaaatcatgcctagaggagggtcaagatgcctgactggacacagcccagaagcaccactcccaccaagagaaaccaagatattggataaaccaacagacttagagaagatcttcgtaggaaaaacaccaagagttgatacagaggcatgcagacaacagggctgaagagctaggaacctgggaatgtggtgtggggtagctgaacgctagggccagttcccagcactgaaaggctcctaggggaggggttagtgaagggacagagggatgacaggctgtcaccacagaccgctgatgtcccagctatgggagactgcccacctcccatagacatttttttttcttttgagatggagtttcgctcttgttgcccaggctggaatgcaatggcatgatctcagctcactgcaacctctgcctctcaggttctaatgattctcttgcctcagtctcctgagtagctgggattacaggtgcccaccgccacgctcagctaatttttgtatttttagtagagatgggggtttcaccatgttggccaggctggtcttgaactcctgtcctcatgacccactcgcctcaacctccaaaagtgctggggttacaggcatgagccaccgcgcccggcctccgtagacattttgtcagaggcatttgaaccagagcaactccatcttgagtaggaggtggagaaaatgaggctgagacctaccgggctgcattcccaaatgatgaaggcattctaagtcacaggatgagataggaggtcggcacaagatacaggtcataaagaccttgctgataaaacaggttgcagtaaaggagccggccaaaacccaccaaaaccaggatggcgacgagagtgacctctggtggtcctcattgctacactcccaccagctccatcacagtttacagatgccatggcaacgtcaggaagttaccctatgtggaccaaaaagggaaggcatgaataatccaccccttggttaccatatcatgaagaaataaccataaaaacaggcaaccaaggccgggcacagtggctcacgctggtaatcccagcactttgggacgctgaggcgggcagatcacctgaggtcaggagttcgagatcaccctggccagtatggtgaaaccacgtctctactgaaaatacaaaaaaaattagcagggcctggtggtgggcacctgtaatcccagctactcgggaggctgaggcaggagaatggtgtgaacccaggaggcggaggttgcagtttgccgagatcacgccattgcactccaacctaggcaacaggagcgaaactccgtctcaaaaaagaaagaaagaaagaaagaaaaacatgttaaatgacaacacaaggatctaattggcaaaactgaaaccaaagaaaattttacagaaaaaatgacctactttctacaacaatagcaatgtttgaatggggggatggaattaaataagtggcaacttagattaacaaagaattaacacacacacacaaaaacctattatagtggatgatttgtatctctatgcaaagcaataaagtaaaaataagaaccagggaaatgacaacattaacgggatattttatgatgtcctgaatgatgattacttttcattgtaagggagtattcatgtaagacagtaaagcattttttaactcttcatcttttaaacatacatagtgatatttttattttttattttttatttattgatacagagtctcactctgtcacccagagtggagtgcagtggcaagatctcagctcactacaacctccacctcctgagctcaagtgatcctcccgcctcagcctcccaagtagctgaagtagctgggactacgtgcaccacacgcctgactaatttttttttttttttttttagagacagggttttgccattttgcccagggtggtctcgaactcctgagctcaggcaatccacccacttcggcctctcaaagcatgaaccactgtacctggccatcgtagtgatatttttacaggtgaaataatataatgttcccaattttctttaaaaagatccacctagcagtgaaggcataggtgaaacggg[143 bp omitted]tcctggcttccagcgattctcctgcctcagcctcccaagtagctgggattacaggcgtccaccacacccagctaatttttgtatttttagtagagactgggtttcaccatg[137 bp omitted]agggaagcactgctggagatgaagacccagagaaaatagaagggaattggacacctacaaccactagaggtcgcaagaggaatatcctttagtgccctgagcccagacctgaaccaaggtttaacagggttcttctcaagtccttggactccttcggtcataatttgggagcctccaaaaaggagagcctgaaatgagggcttacgtgcaggtagtttatttggggaagaggtcagaaattttcttttttttttttatggagttccgctcttgttgcccaggctggagtgcaatggcacactcggctcaccgcaacctccgcctcccaggttcaagcgattctcctgcctcagcctcccgagtagctggaattacaggcatgcgccaccacgcccggctaattttgtatttttagtagagacggggtatctccattttggtcaggctggtcttgaactcctgacctcaggtgatccgcccacctcagcctcccaaagtgctgagattacaggtgtg[137 bp omitted]cctctccccgtcaggttcaaacaattctcccgcctc[134 bp omitted]cagcttcccaaagtgctgggattacaggtgtgagccaccatgcccagccatacattttacttttgaacactacataccgtggaatacttttcagactttaaaaggaatgaaatactgatacatgcttcaccgtaggtgaacttggaaaacattgtgcaaaattaaatacgtcagacacaaaaaggcaaaggccgagtgattccacttctaggagattcctagaacagtcaaattcctggacacagaaagtagaacagagcttaccagggactgagagaaaaagggaatggggtgtgattatttaacgggtacggagttttaattgggaaagatgacaaagttctggagatgaatcgtgatgatggttacacagcgatgtggctgtacttaatgccactgaagtgtacactttaaaatggttcacatggaggc[275 bp omitted]caaaaaaaaaaaaaaaaatggttcacatggaaatgtttgtgatgtatattttatcaccgtaaaaaaatgtaactggggtaagtatgatcaatatttggcaatttaagctttatggtagaatttcattactagagtgaagaaagacagtccataaaaaataaattatttaggccggggtgcagtggctcatgcctgtaatcccagcacttcgggaggccgaggcaggtggatcacctgaggttgcgagttcgaggccagcctgaccaacatggagaaaccccgtctctactaaagacacaaaacttagccaggcatggtgacgtgtgcctgtaatcccagctactcgggaggctgaggtgggagaattgcttgaacccgggaggcagaggttgtggtgagctgagattgcgccatcgcactccagcctgggcaacaagagcgaaactccgtctcaaaataaataaataaataaattatttaattgaccagatagggactcccagcccttccttcctggggagctccaggagctggctgggctgggcttaatctttcctcccaaagaaccaaaagaaaaagagatgcacatcaaggtttgctggggaccctcaaaggaaaagaaacgatgtaactcgagtagaggataaacgctttgttcagctgatttgcatcaggggcacctgaagatcaagcgactccccagttaagcagagtcagggtgggaaactgagtctgtgtcctagaggtctgggtttaggcagtcattttgggttttgttttgttttgtttgttttgaaacggagtcttgctctgtcacccaggctggagtgcaatggcgctatctcagctcactgcaacctcctcctcccaggttcaaacgattctcctgcctcagcctcccgagcagctgggattacaggtatgcaccaccatgcccagctcgtttttgtatttttagtagagacagggtttcgccatgttggccttgaactcctcgcctcaggtgatctgcccacctcagcctcccaaggccagaggatcactttaagcccagtgtcaggcctctgagccgaagctcagccattgtaacccctgtgacctacacatatacgtccagatggcctgcaggagccaagaagtctggagcagccgaaaaaccacaaaagaagtgaaacagccagttcctgccttaactgattaacccaccttatgacattccaccattatgacttgttcctgccctgccccaactgatcagtcgaccctgtgacattcttctcctggacaatgagtcccatgatctctccacaatgcaccttgtgagcccctcccctgctgacaacaaataaccacctttaactgtaactttccactgcctaccccagccctataaagctgcccctctcctatctcccttcgctgactctcttttccaactcagcccacttgcacccaagtgaataaacagcctttgttgcttacacaaagcctgtttaggtggtcttctatacggacacgcgtgacacccaggagttcgagacgagtctgggcagcatagtgagttttcatctctaaaaaaaaaaaaaattaaaattagccaggcatgccttgtacgtgcctgtggtcccagctacttgggagactgaagtggtaggatcgcttgaggctgcagtgagccaagattgcgccactgcactccagcctgaaggacagagcaagaacttgtctcagaaaaaaaaaaagaaaaaaagaataagaaaaggaaaaaaataaaaaaggaaggaagggagggagggaggggcagagagggagagaggaaggggggaaggaaggaaagaaagaaagaaagagaaagggagggagagagagaaaggaaagaagggagggagggaagaaagagaaagaaaaaagaaagaagaaagaaagaaagagaagaaagaagggagggaggaagggagggagggagaaaaggaggaagggagagagagaaagaaaaagaagaaagaaagagaaaaaaggaaggaaggagggagggagaggaaaagaaagaaagagaagaaagaaagagaaaaaagggaaagaaagaaaagagaaaaaagagaaagaaagaaagaaagaaagaaaagaaaagaagggccgggcgcggtggctcacgcctgtaatctcagcactttgggaggccgaggcgggcggatcacgaggtcaggagatcgctgaaaccctgtctttactaaaaatacaaaaacttagccagggtggtggcgggcgcctgtagtcccagctactcggaggc[144 bp omitted]aaaaatcatttcaagggtaggcgacgggagccttgcggtttagccgctagtcaacggatgggggggagtggtagcaaaaacataaaaatggggacaagagagaaactggagactccccaacctgtctgtttccgcccttttacagtactgaggggaaaaaaaagccttctttccttgggaaatgcaggaagccagcaagcggccggagtctccggagcccgcaaggaggcgcgttggctgcgcagagagcgcgcttcccagctggagagcctaggaacggtggcgcgggcggaggcgacagcgaggacccaaggctggggtttcctgcttggatcaggagtgcctggggagtaagttctacaggaaatgtcaatctactggtcgtgggggtcagactctggggtcgggtcgatcgggtcccgggggcggggggtgggacgggggtgggcaggcaggagtgcgggcgctgggatcccctgcctgctcggctcccctctcctccccctggtcccttacaccgtccattttgaggaaggggtcaagaagcgagtacaaaatgtctgggcaggacgaatctctgtagtcggtccttcctggcggcctcgttaggttgatttatttcaacagtttgatccccatcctggtgcagctccgagacgctcctgggctgcgcgcgcttttgggctgcgccaccgacagagacatctggaagccggagctagtggaagagtaagtgtgcctgagtgtccgtactaagggcgggaccgggccggggcccagggacttgagagttgctgtctgcaaaagcctcattgtctctacccttccgggaggaaaggggaaggcacgaatgacccacgtgttcagaccccgagcgcgcccttcaccttggcccagggagaagggcgcttcccccataccgtgctgcagcgttgcgaaagcgcctgtccccgggcttgggcagcagagatgcccgcatgcagcggttgcaggggttgtgttctttgcatccatgaaagtattggagctggccgggcgcggtggctcacgcctgtaatcccagcattttcgaaggccgaggtgggcggatcacctgaggtcaggagttcgagaccagcctggccaacatggtgaaacccccatctccactaaaaataccaaaattagctggccgtggtggcatgcgcctgtaatcccagctactcaggaggctgaggcagtagaatcgcttgaacccgggaggtggaggttgcagtgagccgaaatcgagccattgcactccagcctgggcgacagagggagactctgtctcaaaaaaaaaaataaataataataataataataattagccgggcatggtggcgggcgcctgtgatcctagctacacgggaggctgaggcaggagaatcgcttgaacctgggaggtggagattgcagtgagccgagcgcctgtaatcctagctacttgggaggctgaggcaggagaatcgcttctacctgggaggtgaaggttgcagtgagccgagatcgtgccactgcactctagcctgggcgacagagcaagactctctctcaaaaaaaaaaaaaaaaaaaaaaaaagtattggattggagcctgttgtgatgagggtgaactgaaaagtcctgggcagggccagacgtgcaggatgcactggtttcttacgagaaagagctttttttttttttttttttttgagagggagtctcgctctgtcacccaggctggagcgctgtggcgcgatctctgctcactgcaagctccgcctcccgggttcacgccattctcctgcctc[134 bp omitted]ggcctcccaaagggctgggattacaggcgtgagccacagcgcctggccagataaagagctttgagggtttgagttccgtgtgctgaacatggtcttttatgggaactgagacctcagcagaggaaatatataaaaaggacaagctgcaaggagagtggtgtgaaggtgtcaggatcaaaccccacggtcggaacaagatgcatttttatcactaatccgctccggtgaggtctgatttactggaactcagggcaaaggtgggaatgtgtttcatcagccaggtatatcttcgtcatggacaatcaggcaaaagccaacctcagcctgctcacctgagctgactcacaatgatgcgttgtttttctttttcttttcttttctgttttttttttttttaaactactgtcctgagctgatgtgtctgaggttactagggtcagaaccggcgctccaattgtattggggaaaggacggaattcagggaaacttaaattgaaataggcggttttatcttcttaggtaggcttacagctgagatgcgtgtaatggggttatcatcaggtgtggctgtttccttgggaactataaggtcaagatagacgtggaatgttgtgtctcaaaaactcttatttacagctcagcccctgagttgcacaggcttgcttctgtgtcaaagtgacttgga[138 bp omitted]gcctc[134 bp omitted]ggcctcccaaggtgctgggattacaggcgtgagccaccgtgcctggccaatatatatgtatatatatttttatacatgtatatatataaatgcatacacacacacatatatataaatatatacacacatatatttatgtgtgagtgtctatatataaattcagctttttctcatatgattaatttaatttttaaattattaatggtttagaaaagttttgagtccgcaattcattgctgacagtgtcatgtaaacgtttagatttgtcctcaaattgagggaacttgccatcaagtttcttccaaatatcatgtaagttgtagattttatggcattctaacattttatgaacaaatgactcatcttatactatttaagttgaccacagtcattaaacggtcatcagatgtcacatttggagcaggaagagttttgggggtttgtttttgttttgttttaatagaaaaaaacttttatatatatatatatatatatatatttttttttttttttttgagacagagtttttctcttgttatccaggctggagtgcagtggtgcaatctcgtctcaccgcaacctctgccttccaggttcaagtaattctcctgcctcaacctctctagtagctgggattacaggcatgtgccaccatgccgggctaattttgcatttttagtagtgatggggt[146 bp omitted]tgcgtttctcttccagggctcacaccctcgaacttgcctccctttgttcatgacatttactagttggagtccctgggtagtcagaatggcagaacgtccacgcctgtgcatttgtgtggttgttccttgtgtcgttgaaagttagacctggccaggcacggtgactcacgcctgtgatcccagcactttgggaggctgaggtgggaggactgcttgaccccaggaggtcaaggctacagtgagctctgatcacaccactgcactccagccagggcagcagagtgagaccctgtctcaaaaaagaaagaaagagagaaagagagagaggaagagagaaagagagagagaaaaagagagaggaagagagaaagagagagggaaggaaggaagggagggagggagggagggaaaaagagagaggaagggagggagggagggagacagaaacatcctaggttggtcaggcttcgtggctttaatcccagcactttgggaggctgaggcaggatgatcgcctgaggtcaggagttcaagaccagcctggccaacatgatgaagtcctgtctctactaaaacacacacacacacacacacacacacacacacacacacaaaatagccaggcgtggtggtggtcgcctgtactcccagctacttgggaggctaagacaggagaatctcttgaacccagaaagcagaggttgcagtgagccaagctagtgccactgcactccagcctgggtgatagagcgagaccttgtcttgaaacatatataataacaaagaaaaatttaaacaaaataaaaatgaaagatacatcgtaggtggtgtgttcatcacatcagtgtaactataatggctgtttgttgccgggcgcggtggctcactcctgtaatcccagcc[231 bp omitted]tcaaaaaaaaaaaagctataatggctgtttgtccctgtacaagtcaagctaacattggtggggtagtttctggaggtgagagagcctcttacctcttttttttttttttttttttttgagatggagtttcgctcttgttgcccaggctggagtgcagtggtgcaatctcggctcaccgcaacctccgcctcccaggttcaagtgattctcctgcttcagcctcccgagtagctgggattacaggcgtgtgccaccacacccggctaattttgtatttttagtagagacggggtttctccatgttggtcaggctggtctcaaactccctacctcaggtgatctgcctgcctcagcctcccagaatactgggattacagccttaggccactgcacctgcagagccttacctctgaaagttgcattcctttacgcccagcaagtcctgagtgatgcctccgtaccctgctaatgactgcctcccctttctgtgtccaccgacgtgtcttatttcctgaatcagttgttttattaaggttgcaaaatgatgatttttttttgttgagatagggcctcattctgtcacccaagttggagtgcagtagtgcaatcatagttcactgcagcatcaacctcctgggctcaaatgatcttcccaccccacaacctcctgagtagctgagactagaggcgcacgccagcgtgcccacctaatttttaaattttttgtagagatggggcctcgctatgttgcccagggtggtatcaaaatcctgggctcaagtgatcctcctgcctcagcctcccaacatgctgggattataggtgtgaaccacccagcccagcccaaaatggtgatt[222 bp omitted]gctgaggcaggagaattgcttgaacccaggaggtggaagttgcagcgagctgagatcgtgccactgcactccggcctgggcgacagaatgagaccctgtctcaaaaaaaaattttttttaatatatatatttttgttatattagctgggcgtggtggcaggcgcttgtggtcccagctacttgggaagctgaggcaggagaatcacttgaactcaggaggcagaggctgctgtgagccgagatctccccactgcactccaacctggatgacagaatgagaccttgtgtcaaaaaataaaaataaaaaaatgaatatgtagctggaattctgtagttttccgtcatccgtaaggctattccgtttcttttcttattggaaaggcaaagtaaaggcttaatttttcctctttattaaccaaggcttgtgtttttttccccctctggttttctctgtctgggtatcattatgagcgcaggtatttttagtgttcagtgtgtttccatcaattgcaatgattcactttgtagttcaaatccggccgctgggagacgtttccagccgctgtgcatcctcctaacgcggtctagggcagctcccctgccatctggcaccgcaaggctcacactgggaattttctgttcccagatcagccatgtttccgagggtgttcattgcctcctgcttcttaattcttctaagcattttctatgaatagactgaccagggaggcattgggtgtgtgtgtgtgtgtgtgtgtgtgtgtgtgtgtgtgtgttcgtgacgatatgaagccttttcatcttatatttgaaactttttcctcttacact[131 bp omitted]acctcccagattcaagtgattctcctgccttcagcctcccaagtagctgggattacaggtgtgcgccaccacgcccggttaatttttgtatttttagtagagacagggtttcgccatgttggccaggatggtctcaaactcctgacctcaagtgatccacctgcctcggcctcccagagtcttgggattacaggcttgagccaacgcgcccggcccaattcaccttcttaaagggtgcaattcaatggcttttagtatattcacagacgtgtacgtccctcaaatttagaacatttccatcacccctgaaagaagccctgtatccttcagtggtcatctcccagtccctcatctcccccagccctggacaacctctgatctgctttctgtctctatagattcgcctattctggacatttcattttcaatggggtcatacactgtggtcttttgtgtctggcttcgttcactcagcatcctgttttcagagctcactgggttgtagtgtgtgtcagtgcctcagtccgttttatggctgggtaatattccatggtgcggatagaccacgtttgctttctttgttcatgcattgatcagtattgggttgtctctactttgggctgtaatgaataccgctatgggccaggtgcggtgctcacacccctaattccagcactttgggagggcgaggcgggcggatcacttgaggtcaggagttcgagaccagcctggccagcatggcgaaatcccatctctactaaaagtacaaaaaattagccaggtgtgatggcaggcacctgtaatggcatctaatcgggaggctgagacaggagaatcacttgaaccagggaggcggaagctgcagtgagctgagatcgtgctactgcactccagcctgggcaacagagtgagactccgtctcaaaaaaaaaaattgcaattagattagcggctgccagcagctgggtgaaggggagaatgggaagtgactgctaagggggatggggttttattttgcggtgatgaaaagtatttggaactaggtagaggtgacgtttgtacaacattgcaaatgcactaaatgccactgcattgttcacttaaaatggttaacttcatgatatgcaaatttcacctcgattaaaaaaaaatgctgcttgaggccaggaatttgagaccagcctaggcaacatagtgagaccccatctctatgaaaataaatatgaaaaattaggaggcatgggggcccatgcctgtaccttcagctactcaggaggctgaggcaggaggatcacttgagcccagaagtttgaggctgtagtgagccatgattgcactactgcactccagcctgggcaacaggacaagtctctgtctctaaaaaattaaattaaaatataggtgtgtgtgtgggtgtctgtgtggggggcgggggtggggggatgggggtgtgtgggtgtgtgtgtgagtgtgtgtgtgggtggggggatggggtgtgtgggtgggtgggcgtaagggggttggagtgaggggatgggggtgtgtgggtgtgtgggtgggtgggtgtagagggggtgggggttgtgggctgtggtggggaagtgtgtgcacacgtgcatttatatgctgagattaatgtcaggcaggatccacatacgagtgtggggaaggcagggtgcctggattctcatagctccattcttctcccaagctctgcctcacctgcctccttgaaggaaacacggggaagccaggactggccgtcacgttggtgacaaatatgtcccaggtaagttggcagctcaccctctcccagaagcgtgttgtcgttcccacgagtcaatgtgcctctgcctgtggctgggagtcaggtaaagcacatggagccaggcagggccccccgccagccgtgctgccctaggtctctgcacctctgcttggagagagatgctgccctggggattctcctgggaccacccccaccccagtactgactggtcctttccacacctcatcctggctgccagtgggcttcacgttctgctgcaaagcacactaagaaaggagctgaaagtgtctttggtggggtgcagtggctcaagcctgtaattccaggactttgggagggtgagacaggagaatcatttgaggccaggagttcaaaaccagcctgggcaatgtagcaagaccaccgtctctataaatataaaacaaatttgcctggtgtggtggtgcacggctgtcgtcccagctacttaagaggctgaggtgagagaatcgcttgagcccaggaggttgaggccacaatgaggagtgatcactccactgcattccagcctgggtgacagagtaagactgtctctaaaaataataataaagtaaaataaaaagaaagtgtttttgtcttaaggaactcagggtctcacaggggacactaggcgtttatggagcgggcagtggcagcatctcccgcaactgtcatgacctgcagatgacaagcagtggactgagacgtgccccactccaaattttttttttttttttttttttgagacggagtttcactcttgttgcccaggctggagtgcaatggcatgatctcggctcactgcaacctccgccttccaggttcaagtgattctcctgcctcagcatcccgagtagctgggattacaggcacctgccagcacgcccggctaatttttgtatttttagttgagatggggtttct[132 bp omitted]tagtttgttataacagcctgaacaggctaatgcatgagaaagacacacagttggtcaactggtagagattgaagtccggtcgcgtgactcaggtactctttttcctgagacagggccacaggtgatggtgtgtgctggctgtcccagctacttgggaggctgaggtgggaggatcgcttgagcccagcagttcgaagctgccgtgagctgcatttgcaccactgcactccagcctgggtgacagagcaagaccctgtctcagaagaaagagcacctgagtcatacgaccggacgtcagtctctaccaatcgactgtacctcttcctgttgcattaggctgttcaggctgatgaaactatcacagatggggtggcttaaacaacagacattgattttctcacagttctgcaggctggaagtccgagatcaaaatagcggcagagttgcttccttctggaggctccaaaaaagaatttgttccatgctcttacctagctgctggtagtcactggcgtccttggcattccctggcttgtggacccatcactccagtctctgcctccctcaccaaatgacattcttccctctgtttccctccctctgtccacatttccccttctttttttttttttttttttaatttatattttgtttgtttttttgagacagggtcttgctctgttgcccaggctggactgcagtgggaggatcatagcttattgcaacctccacctcccaggctcaggcaatcctccctcctcagcctcccgggtagctgagactacaggcacccgcccacactcacgggtaatttttttattttttgtagacgggttgtcactgtgttgcccaagctggtcttgaactcctggcctcaagcgatcgtcccacctcaacctcccaaagtgctgggattacaggcatacgccactgcagctggccagatttcctcttcttataaggacaccagtcactggattagggcccacccaacccccagtacaacctcatcttttttttttttttttttttttgagacagtctcactttgtagcccaggctggagtgcagtggtgtgatctcggctcactgcaacctccacctcccaggttcaagcagttctctgcctcagc[135 bp omitted]gcctcccaaagtgctgggattacaggtgtgagccaccgcgcccggccacaacctcatcttaattcattgacatctgcaaagactctagttcacaaatcaggtcacctttgcaggtaccaagggttaagacctcaacctacctttttctgtggagaaaggggtcacagttcaaactgataacaggacacccctccgagccaaactgcatgtgttattttaggactcggtgaccttcgcagacgtggctgtgaacttcaccaaagaggagtggaccctgctggacccagctcagaggaatctctacagagacgtgatgctggaaaattctaggaacttggcattcataggtaaggaggcccccttcctgcacttagtccgtgatgggaccagtgctggtttggaaccgtgttctgggaagtgcattggaaaatgggaactgggttaaattccagagacacagctgctgccccccaggtagtaggtgtagggttcaccatgaaactggaagtcagtttgttgcattactttatttattttattttatattttattttattttattttattttatttattttttgagacagggtctcactctatctcccaggctggagtgcagcggcatcatctcagctcactgcaacttccaccccccaggttcatgcaattcttctgccttagcctccctagtagctgggaatacaggtgcacaccaccacacctggctaatttttgtttgtatttttagtagaggcagatttcaccacgttggctaggcttgtcttgaactcctgacctcaagtgatcctcccacctcggcctccggaagtgctgggattacaggcgtgagccaccacacccagcctttatttttcttttcattaagatggggtctcaccctgtcacccaggctggagtgaagtggcaccatctcggctcactgcaacttccgcctcctgggctcaagcaattctcctgcctcagcctcctgagtatctgggattacaggcatgctctaccacccccagctaatgcattacatttttattctcttcgtgattgaacagaatttgggggatccttatgtaggtgaacatggtgcacaggaaaagggtcgttttgagcccttttggcagagttttagtgcattgatgagaaaagtagagggaccactgttgcacttctattcacacatcatcagcttcagaaccccagcaaaccaaagcctgtgtccatttgacagaaagtctcggcacagttcctttataccacatgcttgcccagtgagcaggatttcaactaggcaaacccagtctgccctctcatttggagcaagaagtggtctgaaaacagtgcagggcagttttgtccaggcatttatgcatctcagtaccaggtagatgtgaacattacaggaccaacaggtttgtaagccagcagcatggtaacagagcaacaggctcgccactgagacagcagggtttgcaacagagaaaagagaaagttgcatgattacatggtgccaaccgaggagatgggaggagacgctcaaattcttctccctggggggttctggggtttttgttttttttttgtttttgagactgtgtttcactcttgttgcccaggctggagtgcagtggcgcgatctcggctcactgcaacctccacctcccgggttcaagcaattcttctgcctc[132 bp omitted]ctcggcctcccaaagtgttggcattacaggcatgagccactgctctcatttttaaggggatcatggaggataagggactggagaattggagacgttgattggtcagaggaagggggatgaaatcatcgggatgaggaaagtacattctttggtgcgtcagtttctcacggcattcctcagatcagtgagcatagtcatttcatcagaatgcaggacctgaaggaatatctcaaagagaaaacttaatgttttataattttcaagttgttatctacagagcagctaaggagacctataggccaggcacagtggctcacacctgtaatcctagcactttgggaggctgaggcaggaggaggattacttgaggccaggaagtcgagaccagcccagccaacatggcaaaacactgttctttttgtctttaaaaacaatttttttttaattaaaaggaaaaaaaaagaaagaaaaaaacaggcactctgttgcccaggctggagtgcagtggctcagtctcagctcactgcaatctctgcctgccggattcaagtgattctcctgcctcagccccctgagtagctgggattacaggcacacgccaccatgcccagctaatttttctatttttagtagagacggggcttcaccacattggccaggctggtctcaaacgcctgacctctggtgatccacccacttcagcctctcaaagtgctgggattacaggcgtgagccactgtgcctgtccaagcttatgttttttgacttttatccatcctctcatattttcatttttccctgctaaaggcctgttccttttctccttaaaattgcacatggagccagctactcgggagactgaggcaagaggatcacttgatcccaagagctcaaggctgcagtgtgctgtgatcacacctatgaatagccagccactgcactccagcacctgggcaacctagtgacaccctcatctcaaaaaaataaaaatttcacatggactctctgtccaattctcttccacttagaattcctgatcgtttccttgatctctgcagaactgttcctcagtaacatgacactctccatgttgaacccctgaccttaccgtcatcacattcctgacactgcagaatctctgatgtctttctctgcttccttcctcttgctttcttccccttcacatttttatcatacatgttgagtgaacatttagaaagaaatccacacagaggcctggcgcgttggctcatgcctgtaatcccagcactttgggaggctgaggcaggtggatcacatgaggccaggaattcaagaccagcctggccaacatggtgaaaccccatctcaactgaaaacacaaaaattagccaggcatggtggcacgcacctgtaatctcagctactcaggaagctgaggccagagaattgcttgaacctgggaggcggaggttgtaatgagccaagatcatgccactgcactccagcctgggccacagagtaagactctgtctaaagaaaagagagaaagacagagagaacgagagagagagagaggaaagaaggaaggaaggaaggaggaaggaaggaagggaaagaaagagaaaagaaagaaaggaaggaaggaaggaagaaagaaaggatggaaggagcgagggagggagggaaagaaagaaagaaagaaagagagaaatccacacggagattgcctatgtcatcatctctaacccacctttactttcaacaaagaatttaacttttgtgccactgtatttcagattgggcaactccatgtaaaaccaaagacgcaacccctcagccggatattcttcctaaaagaacatttcctgaagccaacagagtgtgtctcacgagcatcagttcccagcactccacattaagagaagactggagatgccccaaaacagaggaaccacacaggcagggggtgaataatgtgaagccacctgcagttgcccctgagaaagatgaatctcctgttagcatttgtgaagatcatgaaatgaggaaccactctaaacctacctgcaggcttgtgccttcacagggagattccataagacaatgtatcctaacacgtgactcaagtattttcaagtataatcctgtcttaaacgatagtcaaaaaacacatgaaaacaacgaagacgatggagtcttggggtggaacattcagtgggttccgtgtgggagaaaaacagagctgaaatcaagcacatggactggcagtcagaacactgtgcatcatatacgtgatgaaattgatacgggggccaacaggcaccagcggaatccatttggaaaagctttccgtgaagacggatcccttagggcacacaacactcatggtcgagagaaaatgtatgattttactcagtgcgagaacacctccagaaataactcaattcacgccatgcagatgcagttgtataccgcagagacaaacaagaaggattgtcaaactggggcaacctctgccaacgctccaaattccggttcacacaagagtcattgcactggagagaaaacccataaatgccccgaatgtgggagagcctttttttatcagtcattccttatgagacatatgaaaattcacactggagagaaaccgtatgaatgtgggaaatgtgggaaagcctttagatattccttacaccttaataaacatttaagaaagcatgttgtgcagaagaagccctacgaatgtgaagaatgtgggaaagtcattcgggagtcctcaaaatatacacatataaggagccacactggagagaaaccctataaatgtaagacatgtggaaaagactttgcaaagtcgtcaggacttaaaaaacatcttaagactcacaaagatgagaagccctgtgaatgaaaggaaggtggaaaatttttcattaattttctgactgtaccaaacatgtgaggaggacatattggaagggagctcaaggggttagcatgagtgagaacatcttccctgaactctcgtatcttacagaaatgtgaaaaaaaaccctgtgaaggtaaagtctacagaaagcctttcatcttcattcatcttgagtagacatttgttctcaccctggagagaaactgcgaatctaaaaggaatatgacaaagccttcagcgtggtctcaaattcatggttcatacaagaactcacactgcagagactc[136 bp omitted]cccgtctctactaaaaatacaaaaaaaattagccaggcgtggtggcaggtgcctgtagtcccagctacttgggaggctgaggtaggagaatggtgtaaacctgggaggtggagcttgcagtgagccgagatggagccactgcactccagcctgggggaaagagcgagactccgtctcaaaaaaaaaaaaaagtaggaaagacctctttaaacacttaccactcatgttgcatgtgaatccacatcctgaagggaggctacaactggaataaaaataagaaagctttcaaggcctggtgcagtgactcacacctgtaatcctagcactttgggagtccaaggtgggggattgcttgagtccaggagtttgagaccagcctgggcaacatggagaaaccccatctctacaaaaaaaaaaaaaaaaatgcaaaaattaaccaggagtggtagcacatgcctgtagtcccagctacctggggagctgaggcaggaggatcgcttgagcctgggagcttgaggcagcagtgagctgtgtttgcaccactgcactccaccctgggtgacaaagtgacaccctgtctcaaaaaaaaaaagaaagctttcaggtccagcctttcacttaggcacaatgagcgcacagtaggactgaaacactgtaaatgttcatgattttccagtttttcctttctaaaaaaaaaaatgctacaagatgaaggatatccctctttgcacactcccagctctgccacataaatgttggtatatagcaggttcattataactcacatacacgtggtctcattttcaatgtgaagccttctttgagcctcattcaatttagacttgggattcatatactccatgataccatttttgtcttattggtcactgttcaactgcattatggtcagagtatgtggtctttctggtaccaacttgggttacttgttatgactttgtcagtctaatgtgccctattctgtcaacttccctgccacctccattcttctcatcttctttactaagggcacatagattcactttccacaatgagcactatttaatgtcttatttttatttttattttatttatgtatgtatttattttgagacagagtcttgctctgtcacccaggctggagagcagtggggcaatctcgacttactgcaacctctgcctcctgggctcaagtgattctcctgcctcaccctcccgagtagctgggattacagacacccaccaccacgcccagctaatttttctatttttagtagagacgagatttcaccacgctggccaggctggtctcaaactcctgacctcaagtgacctgcctgccttggcctcccaaagtgctgggattacaggcataagccactgtgcccggcctcttttcaatcttttaaaagttgggaaacggccgggcatgttggctcatgcctgtcaccccagcactttgggaggccaaggtgggcggatcgcctgaggtgaggagttcgagaccagcctgaccaacatggagaaaccccatctctactaaaaatataaaattagccaggtgtggtggctcacgcctgtaatcccaactactcaggaggctgaggcaggagaattgcttgcatctgggaggcggaggttgcggtgagccgagattgtgccattgcactccagcctgggcaacaagagtgaaacttatctcaaaaaaagtaaaaataaaaataataaaaaataaaagttgggaaatatgactacctgaaaatgcatgaaaatgtacatatacattttttttttcgagatggagttttgttcttgttgcccaagctggagtgcagtggcgtgatctccgcttactgcaacctctgcctcccaggttcaagtgattctcctgcctcagcctcctgagtagctgagattacaggcacctgccaccacgacatttcaaagttaataaagtgatcacccttatacccaccatccaagcccgtaaacagctcatcattaaacaccaggcaattcacgtctgtgcctcacagacgacatctccagccccaagaggaaaccgccatggttcattttgtatcattcgcccccctcgctcatctttatgtttgcagctatgcagaaatccccaaataccctgttttctagtttcgatgatgtttatgctgcgtatgatggcatggcatagaatatttctttgtgccttgcttctttcaggaaaagaaaagctaagcaggtagggtgcaggtggcattcattctttcttagttatattcattccagagaccctggatctgtatctcactttagagattataaacatgctgctaacaccaatttt[222 bp omitted]gaggcaggagaattatttgagcccaagaggcggaggttgcagtgagccgagatcgtgccactgcactccagcctgggcaacagacagagtgagactctgtctcaaaaaaaaaaaaaataggccgggcgcggtggctcatgcctgtaatcccagcactttgggaggccggggtgggtggatcacttgaggtcaggagttcgggaccagcctggccaacatggcgaaaccccatctctactaaaaatacaaaacttagccaggcatggtgcagacatctgtaatcccagctacttgggaggctgaggcaggagaatcacttgaacaagggaggcagcggttgcagtgagctgagactgcgccactgcactcccgtctgggcgacggagcgagatttcgtctccaaaaaaaaaggaaaagaaaagagaaacgccactggtaagagcagaggtcctcctaggcgcgcattctgcatggccccagcactgttaagttcagctttcagtgtttggggaagacctgcaggtcagggacccccactgtggctgagggggctcaagcttggccctttctcccggacccctgctgcctgcgtttcccagcaatctgctgctttatcctagaatctgggtgactcatggccctccccatcctggaaggaatgaagaggaggaggggaggctgctatgccaggacagtcccagaccttgccaaggggcctgggtccactcccacccccagggagcgctgtgcggaggaaaaggaccatggctgaaatcagaatccctggattcaaccgggggtggagggggccggggcgggaggggggaaacatctgtagctgagggaacacccctcccgcctccagtcgctgaggctgaacttagccgactttggggattccccaccctctacccccaactggtcctcaattctcacagatgtaaactgagaattttcaacaatcgttttggcaaacatacgccaggcccccttctgagcgctttgcacctattaactcatgcaacgcctgcaacgctatgaagtggctgctgttatcactaccattttacagtggggggaactgaggcacagcgaggccaagcacgatgcccaagatcacacagccagcaggtggccgggaggggctcgaccccgtgctgtcaggcaccagagactcggctcttcagccccaggccagagcctccctgcactgacggggtcgcgaattcgggcaggagggttcgtgtgtgtcctcacctctgggacgcgagctccggggacgggggacctcgtctggcgtgggaggcatttagtgagcgccgtggactgaagccgggacggtcttaggagaaccacttcccttcttggccgcctgaaaccccctacagggttctgcttctggaactgcattcgaggtcagagtttctagtacgagtaaagcggatcctcgggaagagacccgaccagaaggaaatcgccgtcttggaagatctaagtccgggatggaacaaaacccactccgggcggggggagcgcgccacctggcggcggatcctgctaaggcagcgccgcccggagaccagaaacgttggatttgggcagtgggccgaggtggttggaattggcgaatgggcagttgtctgaaaatcattgtgtgaaactaaggactgtctaccagtggcttccaaaattctgacgcacagtaagaaatcattttgcgtcagcatttttttttttttttttttgagacaaggtcttgctctgttgcccaggttggaatgcagtggcacgatctcggctcactgcaaactccacttccagggttcaagcgattctcctgcctcagcctcctgagtagctgagattacaggcgcccgtcaccgcgcctggctaattttttatttttagtagagatggggttttacaatgttagccaggctggtctcgaattcctggcctcaagtgatctgcccgcctcggcctcccaaagtgctgggattgcaggcatgagccaccgtgcctggccgcatcagcatacttttacaaaagaataccaccctctatagccaacaacaatggattgtatacttcaaaatagctagaacattttgcatgtttcaccgcaaagaaatggcaagcatctgggatgatggatttgctaataaccttgatttgatcactgcacaatttatatatgtatcaaaacatcacgccgcatcct[132 bp omitted]aaaccccatctctacttaaaaaaaaaaaaaaaaaaaaatttgctaggtatggtggcgggcacctgtaatcccagctactagggaggctgaggcaaagaactactttaacccgggaggcagaggttacagtgagccgagatcgcgccactgcactccagcctgggtgacagggcgagactccgtctcaaaaaaaagaaaattttagttttaaaaataccaccctgtattacacggccctgtattacacgatgctttatattccactctattccttttttttttttgagacagagtgtcactctatcacccaggcatgatctcggctcactgcaacctctgtcccccaggttcaagcaatcctcctgcctcagcctccctcagcctcctgagtagctgggattacaggctcccgccatcatgcccagctaatttttgcatttttagtaaagacggggtttcaccatgttggccaggctggtctcgaactcctgtcctcaggtgatccgcctgcctcagccccccaaggtgctgtgattacaggcatgagccaccaggcccggcctattcctatttttaaatgctggtcaggtcaccttaaaatggtttcctgactctctaagggtctgggatagggttttccactgttctagattatccccatgttttttcacttgacagagattatgatgaggaaccggttacacccacgctacctcccagtgagccttccccaccacacaaagctgcctccaggattcgctgccagctctgatgtcaggatgagtaacagctcaggatgctgaagacactggcccaagaccacacagcctggatgtggcagtgcctgtttctgcctcactcctggaggaggaaaatgattaaatacccgtaatttcactgctattgagtacaatttaattcatccttcctccactttggctgataagattgagctgcactcacctgctgttctcttaggctgtagcataaggcattccagaggtcaaactttaaaatgtctttttcactttgggaggccaaggcgggaggatcactggaggccaggagttcgagaccagcctggccaacatggtgaaacctccatctctacaaaaaatacaaaaattagccgggcgtggtggcacacatctgtagtcccagctgctcaggaggctgaggcatgagaatcacttgaacctgggaggtggaggctggagtgagccaagattgcaccactgcactccagcctgggcaacagagcaagaccctgtctcaaaaaaataaaaaatcaaaaatctaggttgaattctcaggtgtctctaaagtggccttcgatgtattctgcgctgggtgctgcagggttgaccatctaaaagtggcgagcccagccccagtccaggggaaggtagaggaagtgaacctgctcattgtaggactaggacccttgaggtgacagagagctgtggttagcctgagtccatcgcactgtggtggtctatgaggccgctttgcaggggcagcaaatcagaaggctcggtctgctgtgcttactctgctatctttggaaggaaagaggaggaaatcgctccgaaatgggagatagggctggtggtcacgactcagctccacaccaagatgagacttcctgggcccccagggaggaagaatagcagttccactgccaggagccacgcctcagaggagctgcctttccacctccctcctgaaatgccattttcaaatttctcctttactcttccatccccagaacctagtacaatatatggcacatagtacatgctcaataaatatttatcaaattaatgagaaaagatatgtggatgtcccctcctgtgcagctgtaaggggagaaatagagttctttttttttttttttaactttcctacaccagttttatttaaaacacaaaaataagtatttctctttctgtaaggaaaaatggctcaaatattgctgaacacaggccagactcagtggctcacgcctgtattcccagcactttgggaggtcgaggtaggagcacacttgaggtcaggggttcgagaccagcctggccaacacggtgaaacccccatctcaaatacaaaaaaaaaaaattagccaggcatggtggcaggtgcctgtaatcccagctacttgggaggctgaggca[137 bp omitted]tcctttccatctttatcgctgtcctgctaatagtcacatgtagttctgagcatttactacttgccaggtactgttctgaggctttctgtgtatcagttcattttattctcacacaaacaagtatgtactattatcaagccattttatttattaatttatttattttctgagatacagcttcactcttgtctcccaggctggagtgcagtgtcatggtctcggctccctgcaacctccgcctcccaggttcaagagattctcctgcctc[223 bp omitted]cacaaaaaagtatgcactatgatcaagccattttaaggggaggctcagggtgctacctggattaggaaggtggatgatagattatctgtttggatttgaacttttttttttttttgagacactctcactctattaaccaggctggagtgcagtaccatgatctcggctcactgcaacctccgcttcccagattcaagcaattcttgtgcctcagcctcccgagtagttgggaagacaggtgcacatcaccatgctctgctaatttttgtatttttagtcgagacagggtttc[142 bp omitted]attaaattttgacagggcatttggcatgactcaactacaggaaagagttatcaaggtgttctaagccctctcactcctacacccacccccgctgcaggaaagggccaaagtcagctttttctctgtgaccctgtggctggagttagggctgtccataaataatccttcctttctctccttccaggcacatgaaaagactgcgcttcccggcgaccctttgaagttcggcgtaacctgctgacccgctctggctgagtgtgagctaagaggacaggtgtcatatcaggtccaagcctcgagagtcactgcctgctgtgccatcctctcttcttcccgtgccaaaggactggcagcactccagtgatggctgtgccatgggcccggggtacacgagtgatatggagcggagcgctcagctggcccacaaaggagagaaaactctgctgcctgaggaccacagagaatctgcagctgtgactgcagcacagcccagcctgccctgaccaacatag[131 bp omitted]agcctggccaacatggtgaaaccccatctcgactaaaaatacaaaaattagccgggcgtggtagtgggcacctgtaatcccagctactcgggaggctgaggcaggagaatcacttgaacccaggaggcggaggttgcagtgagccgagaacgtgacactgtactccagcctgggcaacaagagggaaacttcatctcaataaataaataaataaataaataaataaataagaacgctgaatgagtgagtgaatgaatgaatgaatgaatgaatggcagggaatcgggacagggtcacagattacccccaggctggaggtagaggaagcagccatggctgaagccagctctccacacatatactttatttccacagtcccattttcccatgctgaacctggcgtcttcgccctgacttttcccacacctgtcagcactggggggctcttggggagtaaggagctacagagacagggacacaggatgcgtggagagcctgggagatggagatgaggagagagagccggaaacaggaggtgggggatccacagggggccagggctcagcagacagggaaggggcagatatggagacaagacggacagacactgaccaggaagcccagagaacaggagatcaggagtcagagggaaaagcagtgtcaggagcagagagaaaggaaccgggagacacaggtgaggcggtgatgaagggcagatgaaaacagttgaaggggcaaaaagacagaggcctgccactgggagaaaaagacagagacccacaaggcaaacaggggaagtagagacacaaaaaaagaccccacagagagccagggcagggtgggggctgcgtgcccctcgtgttagccccgggagtctttgctggtggaggagcccgggccagtgctggaggcagggccggtgctggagacgtggtctctgctggacccgaggcctccgctcgaatcagacgctgtgcctccgctctccacaccaccctctgtgttttctccgcccctgctggaccccacgtatccagtggagcccaggtagctgctggcgctgacgggtctgaaggtcacgtggcccccactcgaggcactggtggagccgaaggtcacgtggccagtgttggggtcaccgtgcgtgatgtggctgggcaaatgcccagtgctggagctgaggccgccaaaagtgacgtggccaagagagccacggtctctgctagtcttgtggctcaaaatggacccggggatggcatgggggtgcctggtgggcaccaggacggtactggagccggccctctgggtgctggccaggtccacgctcagggtgccgtccagcttcgcggcggcggcggccaggtccttctggcgctgcgcctccgcctgctcctggagctccacctgcagggaaggtgaactgggccccgacacacactgaggcctggccccacccccgcaggccccactctcaccagcttctccacttggctcagcagctcctccctgctcatggggtagtcatcgctggcctcaaaacccggggggtcttctctggggaggggaaggaaaattggaaaagactagacctcagccctcaaaaaggccagcggcccttcctgctaaaccccgggagcctcagccattctcccaccagccccgagtgcccttcccttctggggcacccggggccccatcctcccacacaggtgccaagcccctactccttctggctgcctcgaagcacatacttcatattctaaccccccagggccacatccgccagccagtccccaaaagccccccaaaactctctatcctgtgtgttccctctgcccccatggaagccccgtcccctctgcgtccctcctgccctgcgcctcacagagtgtcagggggctgaagtggggccatcttcttcggaaggtcctccaggctctggcccagcactaggagggcagcgtcggccagggaggtgaagctctggagagtgtgggagcctgcggtcagctgggccacccccgagaccggcctcctgtcccggctccctgccgtctcccacctgggcatgtaggaaggcctgcactgtcaggagctccaccagccgcttctcaatgaggctcaggaagaggcccatgtcccggtctcccatgctggtcttgaccccaaggaggtcatcgatcatgctgctgtcgcaatgggccttggtgaagaggagctggatatctgcgtcatggagggccggttgtcagggatctggcaccgccagctgggtgccagccctctccccactcaggtcctcactgccccattctacagagactgcggtcaaggctcagagaccaaaagggagtcacccgagctcagccagccaggcagggggacggcactgctgtgcatccctctctccctgacttgtccttcaaagtcagcctcaagtgtcactgcctccaggaagccttcccagtgaccccagcagagccagcctcatgagtgtgagatccaggcagtggtgaggggcctgcacttggcttgacacgctgctgctcttcctatcttgaaaatctcagcaattttttaacaaggggcccctcattctgcactgggccccacaaattatggtcttgcaccccagactgagttagggccttctctcgcccccagtgcctgggcgtcctctgtcctagcccctgagtgatgagtgcccagtgcgcaggtcagtcccctccagggcctctccccactgtgcccacatcacctagcacagggctcggatcagccatcacgacagcaggaaggaggacctgcccatatctgagctcctacggtatgccccgaggaggctctccagctcgctccccaccaccccccacctttctctccatccgtcatcccttctaattctcatgacaaccctgcaaagtaggcactgccatccccattcccagagcggaaggaggaagccacacaccaaggttcacaattggtggagctgagattcaaacccaggacaggctgggtgcagtggctcacgcctgtaatccagcactttgggaagccaaggcaggcagatcatttgaggtcaggagtttgagaccagcctggccaccatggtgaaaccctgtctctactaaaaatacaaaaaaactagccgggcatggtagtgcaggcctgtaatcccagttactggagaggctgaggcaggagaattgcttgaacccgggagatggacgttgcagtaagcccagatcacaccactgctctccagcctggctgacagcgtgagattccatctcaaaaaaacaaataaaagctaacaataaatgttttaaaaaagagaaaagaaacaggacagcctgactcctgagtgctctgcatggctacttcctgaaaaataagaaagatgaggcccggcgcagtggctcacacctgtaatcccagcactttgggaagccaaggcgggtggatcacctcaagtcaggagtttgagaccagcctgaccaacatggcaaaacccccctccactaaaaatacaaaaattagctgggtgtggtggtgtgtgcctgtaatcccagctactgggaggctgaggcaggagaatcgcttgaaccaggagggggagattgcagtgagccgagatcgtgccactgcactccaacctggggaacagagcgagactttctcaaattttaaaaaataataataataatagaaaaaaaggatgcacaggtggatgcaacatacccacagaagggattaaaaaaaaaaaaaagaaactcagccaggagtggtggctcatgcctataatcccagcactttgggagtccaagacaggaggatcacttgagtccaggagttcaagactagcctggacaacatagtaaaatcctatctctaaaaaaaaaaagggccgggcacagtggctcatgcatatgtaatcccagcactttgggatactgaggcgggcagatcacctgaggtcaggagtttgagaccagcctgccaacatggcgaaaccccgtctctactaaaaataccaaaattagttgggcgtggtggcgggcacctgtaatcccagcaactcaggaggctgaggcagaactgcttgaacctgggtggcagaggttgcagtgagccgagattgtgccactgcactccagcctgggcaaaagagcgaaattcctctcaaaaaataaataaatgaaaaaaatctaaaaaaatttttaaaaaggaaactctagacccctacctcataccataatgcaaatcaatttgtcataagtcacagacttcaatgtgggagttcaaacaatgaaacttctaggagaaaacacagcataatgcctttgtaacctcaggacaggcaaaaatttcttaggcaggccacaaagtcattaactacaaaaagaaaatttcataaattagatatcctcaaaactaagaaacttcagttcatcaccaaaaaaaatgaaaaggcaagctacagtataagagaaaatatttaccaaaagtctagtatctagaatatacaaagaactccttcaactcagttatagcaagacaaacccaatttttaaaaaaacaagtgcacaagattgaacaggaactttacaaaaacatctgaatggccaatacgatgctcaatattattagtcaccagggaaatgccaattaaattaatagagagagtacg[143 bp omitted]cccgactctactaaaaatacaaaaattagctgggcgtggtggcgcacacctgtagtcccagctactggagaggctgaggcaggagaatcgcttgaacccaggaagcggaggttgcagtgagccgagatcatgccattgcactccagcctggtgacagagcaagactgcatctcaaaaacaaaacaagataaaaaatggctgacactaggaagtggtggaaaaggtgtggatcatcggggactcccatatgctcgcataggtgagagcataaaatcttgcgaccagtgtggaaaactgttcggcattttctaataaatatcaacatatacctaccctaagacccatcggtcccactgctaggcatttatagacagagatgtacatggatgatccatggatgaatactgggtagatggatggatgggtggatgatggatatgggacagttggagggacagcatctgttttttagtgttttgtgaaacaagtggaataatgcataagtgccttgcacagtgaatgacacataataaacattgctattatattttatcatcattttctttacaaataataacatttttggtaactaagactaagaagaaatttggtaactaagactaagaagaaatttggtaactaagactaagactaggaagacaaaagtcaaatgtcattgcagatagatggatgaacagatggatgtggggctgttggaggcagatggacagatagacaatggatggattgatggacatgggacagatggagggatagaccctggatggatggatggacatgggacagttggagggatagaccctgcatggatggatggacatgggacagttggaggaatagatcctggatggatggatggatggatggatggatggatggatggatggatggatatacggacagatggatataggacagatgaaggggtagatcctggatggatagatatgggacagatgaaggaatagaccctggatagatagatggatatgggacagatggaggtatagaacctggatggagagatagatataggacagatgaaggaatagatcctggatgaatgatggatacaggacagttggaggaatagaccctggatggatggatggatgggtggatgaatggatggatggatggatgaatggatggatggatataggacagatggaggggtaggtcctggatgggtagatagatatagaacagatgaaggaacagaccctggatagatagatggatatgggacagaatggagggatagaccctggatggagagatagatataggacagatgaaggaatagatcctgaatggatgatggatataggacagttgaagggatagactctgaatggatggatggatataggataattggagagacagacgttgaatggatggatggatggatggatggatggatggatggatggatggatatgggacagttggagggatcaaccctagatggatggatggatgcattgatagatggatggatggatgggtgtaggacagttggagggacagatgatggatggatagatggacatgggacagttggagggatagaccctggttggaaagatggacagatatggggcaactgataagcaagtgaaccaggttgtccatgcaatgcctccaagccccgcgggctgatggtgtccttccaagtggagaagccaggctcgggagggggcgcccatgggtgctcaccagccttgagcttctccagctgtccccgcacatcctggaagcgggcctcaaggcgctcagcctccgagtgcaccttgtccatgcgctgctgcaacaccttctgctgctgctcctgcagcaaatgctggtcatccttgctggcacgtgcgctcaccaaagcctcctgcatctgtggggacagggctgaatgctgggccagatggcagcctcgggagttgggggtgtggagctaggaagaagcaggaggcaggctgagggagggaagggggcggggaggccgggaggagaggaggagatggagagggcaggcctcactcacctccttgatctcttcctgcacatgctccagctccaagttctgctcgttgatgaagttgaactcagcaaagttgcgctcctcgactgggagagttgggcaaggcggggcccagagagagggagacagagaaacagagacagagagaacagagacagagaggcatacagaaggccaaagaaagtgaagatgaggaaggccacacagaaaccaaggcagagagacgaacagagaggagtcacagagacaaagaggtgtgggaagatacggcaggtgggacacagaaatacacagcaaggcagagagggaaagccagagactcggcaatagcaagggagatggggagatgcaggcggggagaacggtagatatgggtaaggagagaaacagagagggacagggttgagggaaggatgtggagagtgaccccaggcccaggagttaggagggggtggggaggggcagagacagggccacggtaagacgccagtggacgcgggcggcgggtcccaggcatgacgccttgttcctccagcacagatggaggagttccccagggccagagctgaggccagcctgcactggactcagggggtgccggggtcccgggcctcctccctccacccagggccccactcactctccagatacttctgcaccaacaggtcagggtcactctcccccatcagctgggacagtttattcagggcgtcctcgtagcaaagcaccagcctctcctgggaggtcttccagacgccctcggccacctccccggctaggggaagagagaacagcaggtcggcctcctgggtggcctccaacacagagacctcctgggtgagggggagcgaagtgtggtcccacctggggcacgaaggtgtgctgcaggtgccccaggggcggccaggcccttgagatgcaaaggcagcagccccagcctcaccctgcttttcacgcttctccaggacatcgggatccggctgccggtcgttgttcttgagcttgaggaagtggtgcagctgctccaggtgcaagatctgccgctgcaggacctgcgcctccatctcgctctgggcctcctctttctccgcgcgctcccgcagcaagcccatcttggccttcgcctcctccctgcgggggtcagccggggtcaggatgactggaggctggactggggtcggcctggggtcctggggatgggcggggtcagccagaggttgtggggggtgaggtggagtcagctggtgtcccagatgggcagggccagcctggggtcacaggaatggggctgaatcaggttgcagttatcctgtggtcacaaaaagcagagaactggctgggcacggtggctcaggctgtaatcccagcactttgggaggcaggaggatcacctgcagtcaggagtttgaaaccagcctggccaacatggtgaaactccatctctactaaaaatacaaaaattagccagacctggtggtgcatgcctgtaatcccaactacttgggaggctgaggcaagagaatcgcttgaacctgggaggtgaagattgcagtgagctgagatcgcaccactgcactccagcctgggtggcaagagcgaaactgtctcaaaaaaaaaaaaaagacagaagcaagaacttcaaaagagtgcgacatcatattagaaacacaacacaaaactctcggtgtgctgctggctcacgttctttcagcagcctgctctcctcatccttcagagtgtactgtctctctctaggtaaactctctgttctctatttgccttcagtaaattctctttgttggctaaatcagtctcttggcagaattctttctcccaagtaagactaaaaagcgaggattcctgtacttcccggtggcaggtagttttccttttggagtgatggaaatatttcagatctagacagaagtggtgcggttgcacggccccgtgaatgtactaaatgctgctacattctacgctttaaaatggtgaattttgccacgtttgttttaacagagagagagaaagagagaaatcacagagaccctaaggccgacccaggccacagctgatgtcgatcagggaccatgagaaaacagaagccagagaagaacttagtagaaggtaagaaagcatttggagcaaaagaagagggcgaagctgagaaagagacagggatggagtgagagagagagcatggagctcatgagagccccagagagggagagagaagccaacacctaaagcagcttcagctcctcaactccttacagtgtgcctctatctgaaggtggcccgagaggatctctgtcccttgcaaccaatgctgacgaataacaaattcgccagatgcttccaggaaccctgctgcactatatatgtgctagatgcgctttttttttttttttctcctgagacggagtctcactctgttgcccaggctggaatgcagtggtgcaatctcggctcactgcaacctccgcccccagggctcaagcaatcctcccacctcagcctcccaagtagctgggaccacagacacccgccaccatgcccagctaagtttttatatttttggtagagatgggatttcaccatgttggccaggctggtctcgaactcctgagctcaagcaatctgcctgccttggcctcccaaagtgttgggattacaggcgtgagccacctcgcccagccagtagatacattcttatgtgctagatggggtcagtagaggttaatttacatgcccaagaaaaagaacagggccggtggggtgcaatggctcatgcctgtaatcccagcactttgggaggcagaggcgggtagatcatgagctcaggagttcaagaccagcctggtcaagatggtgaaaccccatctctactaaaaatacaaaaattagccagccacggtgccgggcacctgtaatcccagctactcgggaggctgaggcaggagaattgtttgaacctgggaggtagaggttgcagtgagccaagatagcgcaactgcactgtagcctgggcgacagagccagactctgtctcaaaaaaaaagacagaacaggaccttgccagtggaggtggggaactggtggcggggagagagaaaaaggggatattatgggagaaaaaataggttctgacgtgtttcatgagtcctgaaccttcccatcactgccttatggaaaggtgcgtcctgagtcatctgggtcccgccatcccaggatacccgcagtctctacctgacggcgtaggcagaggtggaggagaggataagggtgctgaccaggtgatgcaggtggtggatctcctgtggggggaggagaaaaaaatcagtgccacttcttacaaccccattgctcgaagtctttccttttggccccgtgcttctccaataaggagtaaagctcttgagccttccaaatgtggaccctcctcattagcgactgcccatgaaagggattttaaagaggtgtgaagtcaaattgataagctggatcaaaaggctctttctgtagataagcagaaactaagaaaatatttagtaacctacggggactgggtggaaatgaggtggaggagatggagaggaaatgacgtttccctaggagaccttttggaatagtttgatttgagaaccttgttaatgttttacatattcataaaggaaattaaatcaataaagagaggagagaaaactaaaactgaatgcaaatggaagcaagtgaactttatttaaaaataataatagggccaggtgcggtggctcaggcccataatcccagcagtttgggaggacgaggcgggcagatcacctgagcttgggagttcgagaccagcctggccaacatagagaaactccatctctattaaaaatacaaaattagggccaggcgcggtggctcacgactgtaatcccagcactttgggaggccaagacgggaggatcacctgaggtcgggagtttgagaccagcctgaccaacatggagaaaccctgtctctactaaaaatacaaaaaattaaccaggcgtggtggtgcatgcctgtaatcccagctacttgggacaatgaggcagaagaatagcttgaatccgggaggcggaggttgtggtgagccgagatcgtgccattgcaccctagcctgggcaacaagagtgagactccatctcaaaagaaaaaaaaaaagaaagaaagaaagaaagaaagatgaaatgaggaatgctcaggaaaaagctggtgatattggaatggaatcagaggtatcaatgtgaactcactattgtaaaatatgtcagccaggcgcagtggctcatgcctgtaatcccaatactttgtgaggccaaggcaggagaatcacctgagcccaagagtttgagagcagcctggacaacatagtaagaccccatctctacaaaacataaatagaattttaaaacatataaaatatgtgtgcttcctagctctctccagaggaagggcctcaaagcaatgacacccaagtagcaacagagtctcttagtgccag[248 bp omitted]ctttagcctgggtgacaaagcgagactccgtctcaaaaaaaaaaaaaaaaagaaaacggtctcttagtgcctcaacacctactcttccctagaaagaaccgggactcctcagaaaaatggccaaccccagggatggggcagaacaaggtccagattacccagactatcttcgtgtgccagaaagtgaggaagtactcccaaaaagtgatggggtatgtccaaaggccacagaagccagcttgaaggggctcccactaaccaaatctggggcaatttgaatattaaaatgaatggcagttacggatcatcatctataaagtcagaatacactaatgctcactgacaacactcaaatatacagggggagaaagagaagtgtttcctttttgctttttttttttttgagacagagtttcactcttgttgcccaggctggagtgcaatggcacaatcttggctcactgcagcctccagctccctggttcaagtgattctcctgcctcagcctcccaagtagctgggattacaggcgtgcaccaccacacctggctaattttttgtatttttagtagaaacggggtttcaccatgttagccaggctggtctcgaactcctgacctcaggtgatccgcctgcctcagcctcccaaagtgctggaattacaggcatgagccaccacacccagccgagaagtgtttccttaaggaaaatgcgatcttataaatgtgggagaaatgacagagtcttttaaattaccctgttgcagccattacagtaataaccattcagggaagaatcattcatggatgataaaattgatggcagtagctgctggctgtggctgcacactccatggagccggtaggagccctgacccttctgagttgggatgggagctccccgtgtgcagctgcagccaccagaaccacagctgcagacccaggccttctgctccacagagcaggcaggatccccgccctcctgggcgggactacagctgcccaaactgctgctgtggatctgagcctctctgtgctcttgcagggagccaggagcaggcaggatctgccctcccgggtgcagctgcagctgcccaacccgcagctacagacccgggcctcccactccagggagcaggcagcagccggggacaagcgagggtcctgccccttccgagttggtggggtgggagctcccagagtgcagctgcagccaccctcccaaccacaggacctaggcatctctgaagttctctgcagcctgtaccctgaacggcccaggaaagcaccaccgcacccccctccccaccccgatccctgcaggctcgagcgtgtctgctcctgctgcttggcctctctcctctctcacacccactctgatctcagagaggggttggggtccagcccagtgccatgaatggcagcaggaggcaggcagattcctgggcagaagagggcaagtacccggtaaggtccctccttcaagccagggagggcctgaaggctgggggccaggttgccagtactgcaaaatgagtggggacttgcaacgtctcctccaggcctgcccatggccacccatggagctaccctctctgctgagagcttcagaggcctgcagagacatctgaacaatctgcctgcggagaggaaccaccctctccagggcctcctcactgctgatagctgaacactggacgagacgacctgcctgcagaggagctgccccctgcaggtctcctctgagctgtcctaacactcggtaaagctcctcttcatcttgctcacgctccacttgtctgcctacctccttcttcctggacacagtacaagaactcgggcaaaggcaccactggccaaggaggtttccagccagaaaagtgacgccgtaaatatcccgtaacaaaatgattgagtgaaggtgtgtcaggggacaagatatttacacagtctcagagaatctccccacagaccacttattcactacaaaaaggaaaactcttcctggctagccaagtgatcaaagacaacatcactagtcatgggacaagttgacatcaggtgcctcctgagatcttgcacaggaaggacacactatcactgctgtgacattccccccaaagtgcagatgccaagtctaatcatgaagaaagatcagataaaccggccgggcgtggtggctcatgcctgtaatcccagaactttgggaggctgaggcgggtggaacaccttaggtcaggagtttgagatcagcctgaccaacatggagaaaccctgtctctactaaaaatacaaaattagccgggcatggtggtgcatgcctgtaatcccagctactcaggaggctgaggcaggagaatcacttgaacccgggaggtggaggttgcagcgagccaagatcacgccattacactccagcctgggcaacaagagtgaaacttagtatcaaaaaagaaaaaaaagaccagataaacccatgtcaggggacatcgcacaacacaaacggcctggatgcttccaaaatgtcaacgtcatggagaaaaaaaagcccaagggactgacccagatgaacagagccagaacaaccaaatgcaacgtgagattctggaccggagcctagagtaggaaaatcaagttcactgtaaaggacatcactgggacaatcagtgaccttgacatatggacggtttagaattctaacaatgttaacctccctgacttggataacagcactgtgtttatgtaaggaaatggcgttgttcttaggaaatgctctctcaagtacttaggagcataatgtctacaacatattgtcaaacagttcagcattcaggataataaattattctcagcaaaacaataattacacacaccaatagtaagagtgggggagaaagagaaaataaatgtggcaaattatcaaactgggtgaaagatatataggagttctttgtataattcttgcacctttttctgtaatttgaaattatttccaaatgaaagtcaagaccggacgcagtggctcacgcctctaatcccagcactttgggaggccgaggcaggcgaattgcctgagctcaggaattcaagactagcctgggca[185 bp omitted]gtggcaggcccctgtagtcccagctactcgggaggctgatacaggagaattgcttgaatctgggaggcacaggctgtagtgagccaagatcacttcactgtgctccagcctggacgacagagtgagactcatctcaaaacaaagaaagaaagaaagtcaaaagagaggggacagggctggttcttcaaagatccccgtggaatgtataataaatggtcttgcttgctcatagattgccctgggtgatactattcagaatgacattctgctttctacaactataaatgaggccacttttttgttggaaatgtcctccaacatttcccaggcctccatgccttttggactaaagcaagcctaccgctctagtcaatcccatacttgaggcctgagtgctagagcaggaagggcaaacagctgtggggaggacctgcgcaggggtccctgtctcctcccctggatttcagggccactgaccttcttcagcttgcggtccacgttcagatagcggttcctgtcgatccgcagcagatccagctcctcccgcagggccgcattccgtaccagctggttgtcaaagtgacaggtgacctgggagtagaaaggtggatggaagagtgggtctgaagccaagtctgcctgcctcctccaagctcagccaaggaggagacacttatcagaggttgggccggcctgtttcctgagaaacagaggttctttggggttcccgaaatcaatgtccactcccctctaaggacccatcattctcctttccttgggaacctccatccctccagaatcctgtgtcctgacacatatgtgcacacactgcccagcatttccagaatccaatgaccatgcccagttcttcccataaccgcacaattcaggtcgagggaccaggagtttgaccctcaccctgtccaactggttttctaggatcctgatccttcgcctgatcttgaccttctgatccaggatgaatcccggggacctgacattcttactgtgggtaaagatccgcgtctcccactcctggatctacaagaaagaggatggtacctgtttttggttgcctgaatgtgggagagattgaatggcccagggaaaatgagtcactaagcatggcaaacatctgctgtccctgtcaccccagaataacatctacccttctgctgacactatccagccctccatgtggttctggtgggccttccaaccacagtgtatcaccctatcagccacatgacccaggtctggacactcacagggattggcctagagatg[132 bp omitted]caacctccacctcccaggctcgagcaattctagtgcctcaacctcccgagtagctgggattacaggcacgtaccaccacacccagctaatttttgtatttttagtagagatggggtttcaccatgttggccaggctgatcttgaactcctgacctcaagtgatccacccgccttggcctcccaaagtgctgggattacaggcaagagccactgcacccggccctgactcctttcctgatagtctgggggaagcacatgagatggaaggatgggattccaggacttctcctgtcatggccccaccacagggagggtcctgggagaatgaggccagtggacagaagtggagatgagagtcggagagacggtgagaatgaacttgatgacattagtagccctgggtctgcttatgcctaagaccagcttccaatctgtcctcatttctgtattcatctgtacttattggggtgtgctctgtctctcccagcaaactgggggttccatgaggacacagagtcttgtgttttctccctgtccgagacaaagaaggtattcaacataacatgcagactaaatagataaatgaattgctcaacacttcaatttgtgctctgttatgggttgaatcatgtcccataaaaactcatatgttggccgggcacggtggctcacacctgtaatcccagcactctgggaggcagaggtgggtgaatcagctgaggtcaggagttcaagaccaccctggccaacatggcgaaaccccacctctactaaaatacaaaaattagcaaggcgtggtggcaggcacctgtaatcccagctactcgggaggctgaggcaggagaattgcttgaacccaggaggagaggttgcagtgagctgagattgtgccactgcactccagcctggggaacagaacaagactccatctcaaaaaaaaaaaaaaaaaaaaccaaaaaaaaacctcacatgttgaagtcttaacccccagtactttagaatgtgaccttatttggagacagagtcttcatagaagtaattaaaatgaggtaattaaggtgggccctaatccactacgacgaggtgttcttagaaaaatgggaaattgctgggtgtggtggctcatgcctgtaatcccaatactttggaaggctgaggcaggatgatctctcgaagccaggagttcaagaccagcctgggccacaaagcaagaccccatctctacaagatacaaaataaattagctgggcatggtggtgcacacctgtagtcctagctacttgggaagctgaggtggcagatcccttgagacaaggagctcgaagctgcagtgagctgtgattgagccactgtactccagcctgggtgacagagggagatcctgtctcaaaacaaaacaaaacaaaaaaggaaatttggacatagatacgcacacagggagaatgccacgtaaggataaagacagaggtcaggtgtggtggctcacgcctgtaatcccaacactttcggaggctgagatgggtggataacttgaggtcaggagttcgagaccagcctggccaacatggcgaaaccccatctctactaaacatacaaaaattagccaggtgtggtggcacatgcctgtaatcccagctacttgggaggctgaggcaggagaatcgcttgaacccagggggtggaggctgcagtgagctgagagattgggtgacatgtctacaagccaaagtacccaagactgccagcaaaccggcagaagcagagagagagaggcatggaacagacagattctcccccacactgctcagaaggaaccaaacctgcctacatcttgatcttggacttctggcctttggaactatgagaaaacatatttttgttatacgagccacccaatttgtggaactttgtcatagcagccctaacaaactaatccacgtaccaaagataccccagaaggctgcagcaaacttaagactcagcatgaggatgttttaaatttttgaggaagaccttgatattggtcagataccacatgaactgctagcttaaggcagttcacaagttcaacatgagagggcgctatcatccttttgaagatgtcacatctttgtgagactggattttcagcagttgctgcaataaaagccaaatacccaattgttggtgggcgcagtgtctcacgcctgtaatcccagcactttgagaggccgaggcgagtggatcacctgaggtcaggagtttgagaccagcctggccaaaatggtgaaaccccatctctactaaaaatacaaaaattagctgggcgtaatggcacgtgactgtaatcccagctactcgggtggctgaagcacgagaatcacttgagcctggcctgggaggtggaggctgcaatgagccgagattgcaccactgcactccagcctgggtgactgagcgagactccacctcaaaaaagaaaagaaaaagaaatgtccaaaatgttgacactgggggaaaatgcagcaaagtgtacaagggatgtctctgcattatttctttcaactgcacatgaatcccaacaaaattttctttctttcttttattttttcttttttttagagacagggtctcactctgtcacccaggccgagtgcagtggcaccatcatagctcactgcagcctccacctcccaggccaggctcaagcaatcctcctgcctcagtaattgctttatgaaagaagag[138 bp omitted]catggcgaaaccccgtctctactaaaaatacaaaattagccaggcatcgtggcaggcacccgtagtcccaactacccaggaggctgaggcagaagagttgcttgaacccaggaggtggagattgcagtgagctgagactgcgccactgcactccagcctgggtgacagagcgagactccatctctaaataaataaataaactgtgtaattgttatgttttgacataaaatagtgaaaatatccatcgcccctaaaagtttcctcatgcccttttgtatttcctcacctcatcctcttcctgcagtcgagtctccccccagcaatcactcatctgttttctgtcactatagattggtttgattttctagaattttatattaatggaattgtatagtaaggactcttttggggatcaaaggggtatctggtttctttcactcagagtagttattttgagattcacccatgttgtgtgtatcaatagccggttccttttattcatgagtcacattccattccatgtatagaccacaatttgctcgtccactcgaccaccgatggacatttgggttgtttcagttttcgattttacaaatcaagttgggttgttatgaatattcatgtacaattcattatatggacatgtgctttctttcctcttggctaaacatctaggagtggaatgtctgaatcatattgtcaagtatacgttttgttttttggcaactgccaaactgggccaggcacggtggcccacacctgtaatcccagcactttggaaggccgaggcaggtggatcacttgaggtcaggagttcaagaccagcctggccaacatagtgaaaccccccatctctactaaaaatataaaaattagctgggagtggtggcacacacctgtaatcccagctactcaggaggctgagacaggagaatgtttgaacccaggagacagaggttgcagtgagttgacattgtgccattgcactccagcctgggtgacagagcgagacttcgtcaaaaaaaaaaaaacaaacctgcctaactgtgcaaactgtgtaccaaaagtagtgtgccattccacattcccaccagtggagtatgagagttctgcttcctctacatccttcccgcaacacttggtatggaccgtctttttaatggagtttgggaaagttcttaatatattctggatacaagttctctatcagatacgtgctttgcagatattttctcccagtctggaccttgtcttttcattccttgcctttgccagtttctgcagatgggattccttgacttggggactccttacctgtggccgcatcactggtttttgttttttaaaggggttccgagccaggcacaatggctcacgcttgtaaccccagcactttgggaggccacggtgagtggatcacctgaggccacgagtttgagaccagcctggccaacatggcaaaacctcatctctaccaaaaaatacaaaaatgagctgggcttggtggcacgtgcctgtaatcccagctactcaggaggctgaggcaggaggatcgcttgaacctgggaggtggaggttgcagtgagccaagatcctgccagccactgcactccagcctgggtgacagagcgagactttgtcttgaaaagaaaaagaaagtgggtctctctctgttgcccaggctggagtgcaacggggcaatcacagctcactgaagcctcaaactcctgggctcaagtagctctgccccctcagcctcaagacacgcaccactgtgcccaactgacaaattggttttttcaatgaaggctagaccagaatttagcagaatgaatcccacattaaaaaatgtatatatatatatatattatttgctgaaacttctgtttcagatatattaatatatgtgtgtgtgtatatctgtatgcatcttggtgtgtatgaactacacctcatgagtcatggtcataaaaacttgacagatcactggcctagaaaaatcacattgtttgcaaggtcaaatagcaaggtcccaaaacagatgggattcgcaacctgtctagactgtggcattaccaccgtccttgtttgcagatgaagaaactagggcccagagaggggaaaacctgcctgcccccgatcacagagctccgatggcagagccaggactctaatgcaggttttggggactctaacatgcgaacctttcctgcttaaccacaccagtcctgtttttgaatgcctgggactgtgctaaagcagcaaacatctatgtttccactgaacacaactctaccagatggatgctttcaatagccccgatttttttttttttttgagacagagtcttgctctgtcaaccaggctggagtgcagcggcgcgatcttggctcactgaaacctctgccccccgggtttaaacgattctcctggccgagcacagtggctcacgcctgtaatctcagcactttgggaggccgaggtgggcggatcacaaggtcaggagatcaagaccatcttggctaacacagtaaaatcctgtctctactaaaaatacaaaaaaagtagccaggcctggtggtgggcacctgtagtcccagctactcgggaagctgaggcaggagaatagcatgaacctgggaggcgaagcttgcagtgagccgagattgtgccaatgcactccagcctgggcgacagagcaagactccgtctcaaaaacaaaacaaaagaaaaactattctcctgcttcagcctctcgagtagctgggattacaggcatgtgccaccatgcctggctaatttttgtattttttgtagagatggggtttcaccacgttggccaggctggtcttgaactcctgacctcaagtgatctgcccgcctcagcctcccaatgtgctgggattacaggcatgagccactgtgcccggcctaatagccccaatttcacatgaggaagctaaggctcagggaggttacaacacttgcccgtaagcaggatccgtagaaccacctctcaaaccccacctgcttgtccagggccctggtctgctcctgcagctcctcgatctccgcctgcacctgggcccggcccttcagcaggcggtccatgttctccagccgctgactgtcccgaagccgcttgacctggttctgggctgcgctgatctgcacctggagatcgccccgtacctcctccaagcgccggatctcctcactacccaggcagggaggtggaagaggggccagtaagggggcagaactcagcatcactaaaggcaggacccaggagtccagtcttcagcccctctgaccccctcctccccagctcagggcccaggcgcccagctcacagttgcttgttgatgcgctggtggacttccttgctgtaggcccgcctctccccttccatcactttgcattgtcgctgcagcctactcagctcccaatccactgagaacagggccagccaagggactcagcagggatcctggccaccagctcctcccaacccaggacctaggaattctgctccctttggggtctcacaaactgcaactgaactgcagatccagcccccaacacccctctaggaatgcacctcagttccgggatccctcgagcttcctcatcccttcatacccaaaactgaactcagggtttttttcccctaaaacccactcccatcccaccagagggcacttctggaaggcctctgggtcttctgggacctgggcacaccacctggaattgggaaggctcttgctccctccctccttttctgccccaccatcagcagccctcagccccatcctcttgcctcctccctctctcaacccatcccctgggctcagcctcatcctctcctacctggaccatcaccccaacctttctctcaacttccagccttcctgcacagtcccagagggtctctctacacccacagccaaccctaccccacccacagcagaccctacccctcataggcctcccatgatgccccagtacctgcaggacaaagtctcagcacctcagcctgggatcccagaccccaagtgacctgaccttacccacctctccagtcttgcccgtatgctccccatctccaaaggcccagtagttttcaatcagcgggtgattctgccttccaaaaacatttggcaatgtctggagacttatttttttctagacagggtctcgctctgtcccccaggctctagcgcagtggcacaatctcagctcactgcagcctccacctcgcaggctcaagtgatccgcccacctcagcctcccgagtagctgggattatgggtgcacgccatcacacctggctaattttattttatttttgtagagatgaggtctcactgtgttgctcaggctggtcttgaactcctgggctcaagtgatcctccttcctcagcttcccaaagtgctgggattacaggcatgagccagcatgctcagcctagagacatttgtcattgtcatgacttgtggagaagggagggggctactggtatccagtgagtagaagccatggacactgcttggcatcctacgacacacaggactgcccccacaacaaagaattatcccaccccaagagtcaacagtaccaaggttgagaaagcctactctagccacattctgtcatctctgtagaaacacccttccttccttctccccttggcaattcctacagggagttctgggccccactcaaacttctgctgcctgaagtctccagcctgccccactgcccaggcttggcccacccaccgtggtgcccgccccgcctcccttagggcgcatgtctgttcccaccagagggcgctcctggacagacactctccctccctccctacaggacctggaacttgggaaagctgggggctggaaaagaatgggtgaatgatataaagaatgaatgaattacccattccctccagaaatgcctcgcttccctcctcggagcgggcgctccctgccaagcgtcccaaaggcatcctggccaaacagggtggggctcctgtagggatggacatataagacccttcagacagcaggcgggccagggcccagagagggtggacaatgaactgcgagggactgggaattgaaagggggtgaccctagaaccacgctggcctcattcctccaagaggggttggagggggacctctctcaggcctctcccacacctctccagccctcccacctctcacactctgggtcttgcgtctaggctccgattctggcgcgggtttggcaggggacaggcctcctgggctctcaggatatctgaggccaggctgtttggtcgcaggagagggggaaaccccggcctgctgtagtgggggttgggcagggtcgggggagtcctgggccctacctgccgacgggcctgacctgttcttggtgctccaagttcagtgttgtggtctggttactggggagataagggaccaatgaggactgaggacagcggccagggagggactgaggccgcgggagaaactatgggaggaggggcggagaaggatgcgaggcgtagacctgcagggttcccacggactgagaactgatgggcaaggccaggcgcggtggctcacgcctgcaatcccagcattttgggaggccgaggcgggcgcatcacttgaggtcacgagttcgagaccaacctggccaacatggtgaaaccccgtctctactaaaagtacaaaaaattagccggacatggcggctcgtgcctgtaatcccagctactcaggaggctggggc[138 bp omitted]cctgaaaggggcggagccgggagggcctgtggagcggtgctgcggagccctgagaggtgcacggctgtgaggcctgagaggggcgtgccgtagggagctgtgatgggcggggctgagacctgtgaggagagtgagtgggaagaacttcgaggggcggggcttcggggccggcgaggggaggggcacggacaccagtacaggacggggcttcgcagacagcgagcggaggggcttccccgtaaggggcgggcttcgagggtcgcgtttggaaggccttacgaggggcccggtggaagggcggtgaagggcgggctaatcgggaggcgctcaggccttgaaggcctgcgggaggtcgaaatggtcctggggaggtcgaggctgaggtctcactagtaccgcgggcctggaagcggcgggagttgaaagagcctgcggtgacctgtatggaagccctcgaagccaggccgaggtcctacaagacggagcccgagaggtgccggtcttaagctgactgtgaccacgttaaattaaggattcataggaaggaaggcggtgtcgaagccgggagttgcgcggagaaggagcgctcaacacagcctcagcggttcactacgcaagcgcgaccaacggcttcccgggaagcagccaaaaacgcttggccgcctaccacgtccgcgcgctggagggcggaagtgggtgagacctcgggcactccataccgccccccggtttctggccacgccccctctggttacacccactcgctctgtaaggcacgccccctccgcggcggcggctgctgcccacgtgggcctccccgggcgggcgggcagtgggcgcctctccctgcaggctgggtgtgcccgaagcctgcggtttcctgtgggaggaagcggcctgcgtacgctcagctcagctcataatctcggaggcccaggatggggagatcccgccgccaccctcagatcctttgattcttccccttctacatagccatagtgcggggacccccctaatatccccagggtacccaagcctggcgccgatcccactcagggaacttgattctgagtcctagactcgtgtttttcacctccccggctcaagtttccatcttcctagcccctggctccccctagtcctctcaagaaagtggagccctcttttcctgctccccaagaggaacgtatgtctccccagcccctaatttttccttcagtgacccagactttgcaacttccttagggatctgagtgcggaccccagtttctgtctctcaggcacttaagtttgagactacttattctcccccagggaccctcattttggattcccaactttagccttgagacccaatggacccaagaatttgccccttccccaactcctagagatcctgaatcagggtcccccagtactgactccactcagagccccaatgcctgatatgactagcactaccctaagaactgccctataatgtatttactattatctctatttttcagatgaagagactgaggcatagagaagttattagtaacttgccaaaaattacacagccattgagtaaaacagcttggattttgagtccaaccagtgtggctctagagtctgtgctatactggtattccagcttccaggtcttggggtacccagccaagcactgaactgtccatccctcaccccctcagggagcccgaatcaccaacagctatcccaaacccagctctggcccatcagatacccagacatcccatcatccagttcccttccctggatccaggatttgaattcccctgctctcaatttatcagagttctgggcacctggtcccctcccaagagactcgtgtacatagtagtcatcaccccgaccctaatttaatatccccaaaattaataataatagttaacagtaaacctttggggccaggcacagtgtcttacgcctgtaatcccatcattttgggaggccaaggcaggcagatcactggaggtcaggagttcgaggccagcctggccaacatggagaaacccccgtctctactaaaaatacaaaaattggctgggcgtggtggcgggcacctgtaatcccagctactcaggaggctgaggcaggagaatcgcttgaaccgggaggtggaggttgcagtgagctgagatcatgccactgcactccagcctggatgacagagcaagactccatctcaaaaaaaaaataaaaatctttggtactacactctgttaaaacctaatggctttccactgcacttagaatgaaatccaagcccctcccctagtcttcaagggcaccctttgatttcccttctcaccactccctctgtctccctgtgctccagccacactggcccttctgtctgctccctaaacaacctgagcttgttctcaaaagctttaagagcttttgcacttcctctccccccgacgcccccccaccactccccaaccccagcgttcaaatgactcctgtcttcagctcaaatgttacctcctccaagaggccttccctgattttcctgtttcaagtagtcttccctgcactctgtcattatctccatcactctgtttgatttattattgtatttatttttcttttcttcttttatttttttttttctttaagatggagtcttgctctgtcacccaggatggagtgcagtagcgtgatttcagcttactgcaacctccgcctcccgggttcaagcaattctcctgtctcagcctcctgagtagctgggttacaggcgcccactaccatgcctggctaatttttgtatttttagtagagacagggtttcaccatgttggccaggctggtcttgaactctcgacctcaggtgatcctccagccttggcctcccaaagtgctgagattacaggcatgagccaccacgtccagcctattgtatttatttttcaagtcacttatccttatctgagatttatcttcatcattgatgttttctcttgtctgtcttcctctactagaatacaagctccataataccagcagggctcatgtctgttttcattattaactcccagatcagagtacatgttcaataaatgtttgatgaaggaaggaacaggttaggtgtgtgagtgtgccagtattaccttattcattcagcataagtatcagaattattattatcagtattagtattttgtcagcattattatactctcaacatagactaagatactggagcccaggtgggtgaaataattggctcaaggtcactgaaccaggaaatgatggcgctgggattcttagcttccgcttcctccccgcttccagagtttcacaaggtttttttttttgtttgtttgttttttgttttgttttgttttttttttgcgacagaatctcactttgtcccccaggttggaaggcagtggtgcaaactcaactcactgcagcctccacctctcgcgttcaagcgattctcatggctcagcctcccaagtagctgggattacagtcgcccgccaccacgcccggctaatttttgtatttttgatagagacgggtttccac[140 bp omitted]ccacggggccaacttcaccagcccaatctcaagtccatgccacagaaatctggcctcttttcccagactcctatccagctccaagctccatcagggaaagcagacatccggccccagggcaagacctcaaaactcaagggtcctgagaatcgggccctcccacccctgacgcttgccccccccaagaaccccattccaagagtttctcatctcaaccctgggagggagccccagatgatgtctgtctggagggattgggtgggggcccaaagaaagaggaaccggagtgcctgggccctcccactggcagccgacctcagctgggtgcggtgagggtgggtttataaaagggtcagtatatattgagaggaggagagaaagagaaacgggagcaagagagaaggaggcccagacagtgagggcaggagggagagaagagacgcagaaggagagcgagcgagagagaaagggttctggattggaggggagagcaagggagggaggaaggcggtgagagaggcgggggcctcgggagggtgaaaggagggaggagaagggcggggcacggaggcccgagcgagggacaagactccgactccagctctgacttttttcgcggctctcggtaagtttccagtccgttattcagggctgggacttcttaatttacttgggaatgtagcagtttgggaaggacacccccaggctgggagagacgtccctgactcttggaaatccttttaatttaataagtgatctcttagcacttgaggtggggatatgggaaggggtggggcccggcaaagttttggggtcccagcagagccctccactggaaaacttcctgcagtttttccctcagcggtgtccactgtcctctggggtccctgagatcagggcattgcatgagaacaccccaaatctgggagacctctaggtcccctgttcctgggcaccaaagagtcctgggaggctaactccttcttgggcctctcttccccccagcgcgaatcctatccatttcctccagaagatgtccaacagtcaccagtctggcagcagggtggggtgaggacctcgtggacatagccaggggctggggtttccctggtgcttagagatgggggggggtggggatgagtcaccagatgactcaccaggtccccctcctcccctcaacccaggagaggagtggtgtgagtcaagaatgcctgttgctgggggcagctcctcaatcctgatgtcggggtgcagggtggggtctcaacttgaattttcactatctggcctgtatgtaacccagagtcagggttctggggagagaggagccacattgctagtcctcctcattcaaggaacccaagagtccatctttggccctctccacccctccagccaatggggatctcaggaatccaggccccagcggtctcctccctgagagacccaggagtctgcacccatgcccttcctccatcaggagacatctcacctgcctttatgccaaatttttttttttttttgagacggagtctttctctgtcacccaggctggagtgcaatggcatgatcttggctcattgcaacctttgcctcctggattccagtgattctcctgcctcagcctcccgagtagctgggattacaggtgtgcaccaccacacccagctaattttgtatttttagtagagatggggtttcaccatgttggccaggctggtctcgatctcctgacctcaggtgatcctcccgcctcggcctcccaaagtgctggggttataggcgtgagtgtgcctggcctgtgccaacctcttgagactccgtcccctgctccccctccccaggcttccactgcagccatgtcactcctcttgctggtggtctcagcccttcacatcctcattcttatactgcttttcgtggccactttggacaaggtaagcctacttggagctcagggcccttctgttcccctttggaatcttgccacgcccctcctctaaaggcattctggccccaccccctttacctagtatttcttttttattttatttcatttattttgagacaagggtctcactctgtcccccaggctggagtgcagtggtgcgatctcggctcactgcaacctcggcctcccgggttcaagcgattctcctgtctcagccccccaagtagctgggattagaggcacctgccaccaagcccggctaatttttttattttggtagagacggggtttcaccatgttgcccaggctggtctcgaacccctggcctcaagtgatccacctgcctcggcctcccacagtgctgggattacaggcatgaaccaccaggttaacccttttagctctacctccgatgcctcctccctgtcctgaccctaccccctctcatattaaatcctaactctccccagttctgccccatcccagataccctgcccttttcccagcccttcccacagtctgcctgaccctatcccctctcctttcctaaccctgccccttgtttcgttctctgtccatcccagtcctggtggactctccctgggaaagagtccctgaatctctggtacgactgcacgtggaacaacgacaccaaaacatgggcctgcagtaatgtcagcgagaatggtgaggggtgagggcggcgggactggtcttcaaaggggaaggtaaacccttcgtgtcctcatgggactgagaattgggaaccctcccccaacaaagttggagtgggcggggtccaggcctgagtggctgagtgcctagggctaatgcatgtcccgcctgtctggatgtacctacctcttgttttttttgtttttgttttttgagaccgagttttcctctggttgcccaggctggagtgcagtggcgcaatcttggctcactgcaacctctccctccggggtccgagcaattctcctgcctcagcctcccgagtagctgggactgcaggtgtgtgccaccacgcctggctaattttgcatttttagtagagacaggtttcaccatgttggccaggctggtcttgaacttctgacttcagctaatccacctgcttcagcctcccaaagtgctgagattacaggcgtgagccaccacatccagccagtacctcctgttctgaagaggccatatagataaaagcatgctataggtttaaagaatagagaggggaggccaa[133 bp omitted]gaggcagaagaatcgcttgaacccaggaggtggaggttgcagtgagctgagattgcactactgcactccagcctgggcaacagagcaagattctgtctcaaaaaaaaaaaaaaaaaaaaagaatagagaaaaatctcccaagattctgagaagacaagagtatttttccaaagctctaaggagatggggctggtgctctgaatggatgcctgggaccatttcatccaaattccaaggggatggggctgaaaccacttaaggttctaaaggggtggggccaggtgcattggagttctaaaggaatagagctgcatctatctaaagttctgtgtgaaagatttaatgcaaaactaagattaaaggaagtggtctgctctcaccacttctattcaaccttttactggagtagccaatgcaagaaggcaagaaaaagaaataaagggcatgggaaataaattaggaaaaagtgtctctattcccagtaaacatgttgtttatgtagaaaatccattaaaattctgcaaagcagacagacacagtggctcacacctgtaatcccagcaccttgggaggctgaggaggaaggatcacttaagcccaggagttcaagaccagcctggacaacatagggaaaccctgtctctacaaaaatttaaaaattacccaggttgtggtggcttgtgcctgtggtcccagctactcaggaggcaggggtgagagaatttcttgagccctgaaggacgaggctgcagtgagccatgattataccactgcactccagcttgggcaacagagcaagacctggtttcagaaaaaaaagaaaaaggaaattggcaaagcaactactagaactgagaagggaatatagcaaggtaacagggctcaaggtcaaaataagtgatacatctaagtatctaggcttgtatgggcctaaacgggagcagggatggggcagagaagggtcacatggtgagcaagcaggtgaagctggaactctggacccacggtgatgtccccctctgtgtcctccttactgcaggctggctgaaggcggtgcaggtcctcatggtgctctccctcattctctgctgtctctccttcatcctgttcatgttccagctctacaccatgcgacgaggaggtctcttctatgccaccggcctctgccagctttgcaccagtgagcactgcccctccccaaccctaatcccccaagaattgagcagaagggagtggggtgtgtcaagatgctgggggccctgagaatgggcctctcgtagaaaaaaacaactttcaacaccccacgagccacaagaggtgcctccgtgggctacatctctgcccccagggattgctgggacttgtagttttcagtggctaatgatagttatggcttgtgcgtatgagtcatcagggaactcagagtttcagggagccggggctggggaaggaggtataggtaaatagttttggtcccagggatcggccgtgacgtggggggataaactaattagtacctcagtagagagctctaaatcataataataatggtatttatatcagccaaccgctgtttcttgcgtgcctattgtgcatcagatacttcaagaagttttgcgtactttttaattttttgacttaaggtgcaaagggctaacttaatcacagtcagtttggggaacattataggttcttgcaaagcttctctcttggtttatgaatttactactgcatgtttggcttatagaaacacactcaaaaatattccttggatggatagagagatattattggacctagagagattaaatcagttacctaaggccgcgctacagttgcacggcgctgggcgggggggaaagaaccacaactcccagcaggcagcggcgctgcccacgggccctccggcgcttctttgcccccatgggatattgggaaatgtagtcttgagggggcactgcatgacgtgtggttttcatcttccgcaggcgtggcggtgtttactggcgccttgatctatgccattcacgccgaggagatcctggagaagcacccgcgagggggcagcttcggatactgcttcgccctggcctgggtggccttccccctcgccctggtcagcggcatcatctacatccacctacggaagcgggagtgagcgccccgcctcgctcggctgcccccgccccttcccggcccccctcgccgcgcgtcctccaaaaaataaaaccttaaccgcgggctctgccttgatcttccttccttccgcctccagggacccaggctgcgcacgcttgacctctcctgaacctaacatggtccccaccgccagctgctcagccctcagaatgcccatctcccagcccccaaccccttcctcccgaggacacaggagccgggaccccaggcaccttttccctcccacagacccaagagcctgggccttccccgctcaaggcccaagagacctctgtgaggcacctgaatctagaccttcagacacttctgggaagaacctggattctgggtcccagcagaccctgttaggataggaagcctgcagtgaccagtcctgtctccttgctcaagcttctgtcactctgttgctctctctctctgaaccccgggcatagtgtgtgtttctagattgtcggactctttttttctttctgtccaggttggagtgcagtggtacgatctcagctcactgcaacctccgcctcccgggttgaagcgattctcctgcctcagcctcccgagtagctgggactacaggcacgagccaccacacccggctagttctggactcttttttctttctactaactttccatttgggaagacagctttctttttccctctaggaaaccagtctccctctctctcttttttttttttttttttttttttgagacggagtctcgctctgtcacctaggctgtagtgcagtggtgcgatcttcactcactgcaacctccgcctcccgggttcaagcaattctcctgcctcagcctcctgagcagctgggattacaggcgcccaccaccacgtccggctaatttttgtatctttagtagacacggggtttcaccatgttggccaggctggtcttgaactcctgacctcaggtgatccacccacctcagcctcccaaagtgctgggattacaggcgggagccaccgcgcccagcccagtctccctctctagggactgaacatttggggtcctagagagggagacttcccctgtctccccaaaggctgcctctagcccatatgacacgttagcaaaaattaggaggcaccccttcttctggctgacccagccccacaccaggatacatgtaggggtatgggctgggtcttacagccacccacccgtggctgtgttcctttgtgcagttaacaatctgcacaggccgggtgcggtggctcacgcctgtaatcccagtactttgggaggctgaggcaggtggatcacctgaggtcaggagttcgagaccagcctggccaacatggtgaaaccccgtctctactgaaaatacaaaaaattagccaggcgcggtggcaggcgcctcccagctactcgggaggctgaggcaggagaatcacttgaacccaggaggcggaggttgcagtgagccaagatcatgccattgcattccagcctgggcaacaagcgcgaaactccatctcaagaacaaaaaaaaatctgcaaatctgcacaatcgcacatggctacgctatctcctctgttcatcaggccctgggactcctctggaatcagatccttctaagatcctcttctatgactgtctttgtttcaccgaccatgaacccagcctctttttaggactacagctttctctgtctgggaccccaagacctagctagagtccctcccctctttccaggattcaaatgctttccttccctccaactcctgcagccatcccactcatctagatttttaaaaataattttttaaccactcctacagagcagggttaccctaaaggcagtgcgttaagagtagcctcatccagacttattaaacatgatttattactttgggacaggagacgggagaaattgatagaccaataaatattgcacaggctgctggtggtggggagatccagaccgaggtagtttctgtagaaagggtgaaagacctgggcgaggaaggcacctgaggttgccgggagccaggttgggagcgagtcttggtggcgagggtggtttctggttcacctacctagcacaaggtctccaactccttcagcctagacaccctgatcagcagctgaccagttggcctgccatttaagcagcagcaattgatagcaagatcaggtttcctttagaaattcttattggttccttccctgcagcgacaaccggctgcccaaagttgatggaacccagcagctgtcactggacgtttgccaggaggcagggctaacggccttggtgcacatgatgggcagtttgcccggagcgggctgaaaaagacaatgatatatagtctcgggagggcgcagctttaactcttctacctggcggtttacagaagccagagctgagcagctgtgattggcagacaccctcagctcctcagccaaaccacacttggatgtttatggtgagggtgggactaagaaatggaacagaagcagagctaaatcgctttgattggctgttcatcgaaggggcggggaagacttaacaactgctagctgctttgattggctgctttgcttaagcacacagtgcagcaaaaataatcacctgtcagttattggaagttggagtgaaaagtataataaccgtaattgacagcctgtcgtgaaggaggcggggcttagttcctagcctgctgactgggcagggaggtaggttctactcaggagatgttactgctgggcgtggcttgcgggggctcggaagtgatcggagccactgggtctagtttggggaaacccgggggtgggtacaatcccatgctgggggtcagggcctgcagatgcgccagggcccgagttccgttgaaggtcacctcacagcctgacttggctaggagccagttctccacctccgaccggagccacctggaggtctctgcaaggggagaggcaggtgttctgaggtcacactgagatcggggaagattcgagggagcagcaaggaggggcgtagggcaaagaacaggaagggcctgggtttgggagaagcctaggagtgatcttgaggcttggaggggagcggaacaaggcccaggagggtcgagagggccagaaggcccagctctggggctttcgtctggggaccagtcaggggctcttgggcagggaaggtgggggctcctgtaggcaaggggaccacctggagcccacacagggagcgcgcaggatctcttgtagggagagtgtcagctcaggtagaggaaagaatgacaggagggggccgtgccatggagccaagactcccaaccaggctgaggttaagaaagggctgtcacatcaggcaccaagatcggagtctggattcggaggtcctgtctgctgagggccggggtctcttcgcaaacccgtcaggttcacccgtgggaactgggggtggggacgcatctcgctggggcggggcctcgcgggggtgtggcccctgggggcagggtcccagggccacgtcctaccttcgggcgagccttgagtgccccctggccgccgggccaggaagctgtgagccagcagcgcctccttggtgtgctcgtcctgcgcgcgcagggccagggcgctgagcagctccgagttgttggacgtactgcgatagtacagcatgtgcgccagctccaacgcctgcgcgctgcgccgctgcccgaacatctgcaggcgggacagcgccccgtgggctcagttcggggtgcgcccccacccatacacagcccccggggtcacccccgctggcacggcccacgccgcttactcccctgaggaggcggggaggtcctacccagacctcttcagtacgggtccccagagctcagtcgagggatctatttggggatttttggggtctgtcttttctttttctttctttttctctctttctttctttctttctttctttctttctttctttctttctttctttctttctttctttctttttctttctttctttcgttctttctttcttttctttctttctctttctttcttttcttttctttctttctttttcttccttccttcctttctttcttttctttcctttttttttttttttcgacagggtctcgccctgtagcccagtctggagttcagtggctattcacaggcaaactcataacgcactgaagctttgaactcccgggctcaagcgatcctcccgccttggcctcctaagtagctgggactacaggtgtgcgccaccaagcccgatattttttgtagagacgggattctccctgtgttgaccaggctggtctcaaactcccagcctggagtgatcctcgctcctcagcctcccatagtgctggggttacaggcgtgacccaaggcaccggctggggatctgtatttttaacacacgtgccctcattccagtggctccaagaccaccagccccatctggcctacagttttcagcaaccactgcactggtttgctcatctgagccatgtattaatggatttacccaaaggtttgcagatgataggagttttagctttgaaagattttgttacaatacatccttatgttttagagacataataaagtatttccaaataagtctaggtaggatttacttcaaaatcatccaatagtaggacagtggaggtcttcaggggaaatctgattaactattgctaattgttgatgctaggtgctggctagtggagtttatcatactatcctatttctgtgtttgtttgaacttttctataatgaaggaaaaaatggtttaaaatattaaactgtaggccaagtgcagtggctcaggcctgtaatcccaacgctgagaggccaaggtgggtggatcacctgagcccaggagttcaagaccagcttgggcaacatggcaaaagc[137 bp omitted]atggagaaacccgtctctactaaaaatacaaaattagccgggcatggtggctcatgcctgtaatcccagctacccgggaggctgaggcaggagaatcgcttgaacctgggaagcagaggttgcagtgagccgagatcatgccattgcactccagcctgggcaacaagaatgaaactctgcctcaaaaaataataataataataattagctgggtgtgatggtgagcacctgtagtcccagctactcatgaggctgaagcaggagaatcacctgaacccaggaggctgaggctacagtgagccatgatcataccactgcactccaggctgggcaacagagtgagaccctgtctcaaaaaaagaaaaaagttaaattgtaaagagaagaggagaggggaaggatgttggggggaagaacaggtctgggcccagctgtctactggctgcccacttccccaccgttagtctctttgcttggacccctcttctcatccttgatattggtaaggagaaatgagggcatcagtgccctctgggctcccactgaaaaactgtgcccaggccagatgcagtggctgacacctgtaatccctgcactttgggaggatgaggagggcagatcacttgaggttaggagttcgagaccaacctgggcaacatggtgaaaccccatctctactaaaaatacaaaaattagacctggcacggtggttcatgcctgtaattctagcactttgggaggccgagacgggcagatcacttgaggtcaggagttcgaaaccagcctggccaacatggtgaaaccttgtctctactaaaaatacaaaaaaaaaaaattagtcaggtatggtgacaggcacctgtaatcccagctacttgggaggctgaggcaggagagtcgcttgagcccgggaagtggaggttgcagtgagccaggattgcgccactgcactccagcctgggcaacagagtgggactctgtctcaaaaaaataaataaataaaaatacaaaaattagtcaggtgtgtgtcatgtgcctgtaattcccgctactcaggaggctgaggcaagagaatctcttgaacccgggaggcagaagttgcagtgagccgagatcgtgccacggcactttagcctg[203 bp omitted]cgtggtggtgggtgcctgtagtcccagctactcaggaggctgaggcaggagaatggcgtgaacctgggaggcggagcttgcagtgagctgagatcgcaccactgcactccagcctgggtgacagagcaagactcagtctcacaaaaaaaaaaaagaaaaaagaaaaaaaagaaaacctgtacctgtacccagattcctccattcagccacaaaatgagctcagggccactggaccctgtagctggcaggcctggctgcctgacccactaaacccttaccggctgcccctggtaagacctaagtcctcagtcagcactgtctgtacaacaatgccaatgccaggg[224 bp omitted]aggcaggagaatggcttgaacccaggaggcagaggttgcagtgagctgaggttgcaccactgcactccagcctgggggacagagcgagactccatctcaaaaaaagaagaaaaaaaaaaaacattgggacaaagcctggcccctcagaaacacttaccaaacatcagctactatggaacagtcacccacaccctgtgctgggtgcccatagggtgttcccatctcacaccgaggcctgaggtgaaatgcctctcaagtcagcgcaccccagaaaatcgctgaaatggcctgcaaggtaccaatgacacgcttgcatgtggactgtaccctcttctcaccaggccagcacagtcagtttaggtgcctgcattggaacgaatcgccatttcttcggttgagggcaagatgcaggaatagcatgcgttagggaccgtgtggtatgaaaaacacattgggtttgtgtcagtatctgccaagccgatggagctgaattctagttaaaggagcaggtcactctgtggcacacagatgaagccagagtctccctggagaggggtccccctgccacccggagggtcccttcagcactaccgctgcccacaaggaatacagcactcgctcctcctaccctggggtctatgtcttgggcagcccctccacctactcagtcacaggccaggcccctggcaccatccttgctcccccttcgccaacctgtcagtcccaaccccattctgcagtcccctgactctctctgcccgtctcctcctctgcagctccccagctcatccttggctcagactttatccccgcctgcatcactccagcctcctccctggcctcagtctccccgtccagtttgtctgcacataggttcagagctgcccctgcccctcccctgctcatggtcctcccatggctccccagtgctctcagagtccaagctccgtggcccggcacacgaggccctccctgtcacctcctgctcctcccctgtgaatgcagcgcatgctgaaaaagccggtttaccctgaacaggtcctgctctctcaggcctccaggcccaggcacaagccaaaccacccctggtgtgttcttggaaaatgttcactgcctcatcctcaaggctcaggatggacatcacctctcgcggacgagcagatgcagcctcgggctcctgctgtgccagctgccgcctccattacagaccgactgcctgtgtccagggaccccacacctctccctccagggcaggatcgggctgctgcatctcaggggcaccagttcaacatccctccccaggctgccccatgggcctgcttggtgctgggctaaggggcttcacagtagagcccagggtatggaggaacccacaggggcaccaccccagcctgggacatccgggaaggcttcccagagcaggcagcctctgagctgagggtgaggggtgagcaggggttggccagcccaacaagaggaaagggcatttcagtccaagggaacagcacaggcaaaggcagagaacgagggatggcagggtgggggcgccgcaagcatgcaggaggagctgaggcgcagattcgaggggaaggattgtgtccagtgaggctgggaagcagggtccctggtgccaggctgtgcccagaggaggggcagggcaggactgggtagaatggggaatgggctggaagggaccaactggaggctgggaagagggcctgagcagggggcacagaggtgggacaggaagggtgggctgggggtctagccagtgactggcgggatgacaggtcatccttagatgcggagcccagaagagaagatgtcaggggagacgctgtgcttggcctacagtgagagtgagggccccagccgggaggctgagcctggagcttcttggttgatctgatcatggacagtagagagctcctgtggaaaccacagaagcagagcagccctgtgtcttggaagaaagagggccccatactccgcatcccgcaccttgctccccgcaccccttatcccgcagtggggctctgagtgcctgttccaaggtgagatggggaacttgagaggagcaggagggttgaggcagctggactctgggctcatggggacacgctgcacatgggcttgggtgtgtccagggaacaggagaagccagattaggggactaggggaggggcttgcaatgaagacagagatctgggagcaactgaagcgcaggaggggaccagccaggagggagtctgggagggccaactgtttttttgtttctttgtttgtttgtttgtgttgggatgggagtctcgctctgtcaccgaggctggaatgcagtggcgcaatctcagctcactgcaacctccacctcccgagttcaagtgattctcctgcctcagcctctcaagtagctgggatttcaggcatgcgccaccacgcctggctaatttttgtatttttagtagagatggggtttcactacgttggccaggctggtctcgaactcctgactgcatgtgatctgcctgcctcagcctcccaaagtgctgggattacaggtatgagccactgcacccagccaagggcccacatgtaaaggctgggcctcaccccaaggcgtggggaaatacctcatgaattcatgaatacactaaattaacttgtcaactgggatttttttttttttttttttttttgagatggagtctcactgtgtcgcccaggctggaatacagtgatgccatctcagctcactgcaacctctgccccctgggttcaagtgattctcctgcctcagcctccagagtagctgggattacaggcatgtgccaccatgcccagctaatttttg[150 bp omitted]tttggggtttcactatgttgcccaggctggactcccaactcctgggctcaagcgatcctcccaccttggcctcctgagtagctaggactacaggcatgtgccaccatgcctggtgtgaattgggtttgaaatagggtctttcagagcctgacaggctccatagcaccccaagggccagcaaggggtgaggcaatagtcaccgtgggctgggactcagtgtcttctccccagaggcaccgggcctccctgcctctcatctcgcccctcccctctgccctccatggttgcagcttacagccattccacagctccctgcggctctgaggataaggccttgggtaccactctgggcattcaaggccctcaccaccctctgggacttcccctctctaccctgctcactggatccagccccatgagatacgccaggctgagctcgtgggctctttctccaccaggctcaattcctgtcttccagagctttcctcagatcctacctgagccctggtcccaagcagaaattgctccctccccagcccctctgttggcccaagtatgccagcaccctctcaggcggcacagcctggctattatctgcgggatttattaccagccttcctaagagcctgtcagcatggctgaaaacagcttgaaaaccaatgagccagcaggtgaatgatcgcgtacgacagatgcttcacaccagtctacactcctggggccggtgccaaccctgggaagaatcagtaaaaggcagctcccctctgggctgactcagcctcgagacaggacacgcattttggcaagcggagcacaagttgggtgtcagcctccacctggcccctgggccacgaatccttggatggtgaacaacctgtgcaactgttcaaggcagcccggcactcacatgtagcagaatcaaaagggagcttgttaaaaatatagttccctgggccccagtcccagagtttccaattcagtccactaggactggagcccaggaggctgcatttgtcagccagctcccccagtgataatgatacccagtcaggatggggacttggaacaaacagcccaattagtaatgataataatcatcatcctggtaatagctaactctcacatagcacctcctgtgccatgtgggaggctctattctcagcactgtgcatgttaattcatttaatccccacaacacctctatgagttaggtcccaccatcatccctactttgcagattttgaagctgagacacagagaggttaagcaacttgttcaagatcacacagcgagaagagagtagagtcagattcaaatccaggaagtctgcttccagaacacacccccttcaccgcatcactaaagcgcccctaaagccggcactcagtgagcggctgtcaacccttatgtagcccctaccacgagccgagcactgcccagtgcttctcacagactcactcatttcatgctcacaaccctacaaggcagatctcgctatcatccccattttccagatgagaaaactgaggctcagagagattaagaaacccccctaaggggtgttgagtaaatgaagtagggaagggaaggggaagggaggggagcggaggagagggcaagaagggagggaagggagaaagggaaggggggaggaaggaggtggggagagggagggaagggaaggaaaagaggaacaggaaggaagggagggagggaggggaaggggaggggaggggagaggaggggaggcggaaggaaggggaagaaggaagggaagggaaaggggaaaaggaaggggaggagagagagggagaaaggaaagaagggaggaagggagggaggaaggaaggaaggacagggagggaagggaagggaaagaaaagaggaagaatgggaaggaaggaaggacagggagggaagggaagggaaagaaaagaggaagaatgggaaggaaggaagggagggagggagggaggagagcatgacgcaggaacaatgcatgaaacagagacaactacagggggcctgacctggtccccacagcgcagggccgcaggaggcgtggcaggcgcatgctcaccttggaggcccgcaggcccatgaagatggcgaagagcagcagcagcagggaggtggccaccttgaggtcggttagcaccaccatgcccacgttgacgaagatcgccacgccggagactaccagcatgaggttgagcagggcgcgctgcagggtgggcgtgcgcaccttcagctccggcagcagctgctccaggccttccagcggcgtgtccttgaaactcttcagtaccaggtgtccccgtttggtccgggctgccaggaccacccgcttaaagtatctcctgagggacagagacagaggcaggagcaggatcgggactgcactgcccggggagccccctccaatcctaggacgctcactctggctctacagtcgcacaaccatcttaaaagcgactcagtaatcatggggaagaaaccagggatcagctgtgtccaaccacaggggatcggttcaatcgcgccatcgatccctggtattggacgtgcagattgtttgttggaatcctggccgtgccgcatcttcagaatgtggacctccctctccgagcctcagttttccttattggaaaatggggagaactgtccccatcctttctcttcccctgggaatcaagtgtagtactcactttcccttgagaagaaaagacagcatttggatgagtcacgcctcccatttctcaacttcccgcctggggcccagacacccaaaccagacactgacctgtcagtcccctcttgactctaaccttgctccctcttgctgcagctggggaacaagggccgcctcacctctccgcagggggcagcttggtgaagaagccacgcctggagcccacgctggacttcaggggcatctgcccgactcgctggcccagggcccagaagtgaatgtagacatactgatccaaatttactgtcacctgccggggggatgaaggaagcagtggcgggtgaacatgggcaggagtgttgagggcaggataccagaatcagatgtcctgcccctaaataattcccccgtttcccacttatccccattcaccatctaggcagggctgtcacatatggttgtccatgtcgtatactgcacaagggctcatgatctaacacagtgccattcacgtagaagtcatctttaccatatttcctagaatctaaggtgccactgactctacctgattattttatgaagcaactaaaaacaaaatacgttgccaattaaatgatgtcacaccaccacctgtaaattacatcccaatttcagagatgacaaaacatgactttggaaaaactgcagtttaaaatcactaaaatgtggaatttggggagattttagtattttttatttctgtttttatttttatttctattttgagatattgtctcactctgtcacccaggcgggagtgcagtggcacaatctcagctcactgcagcctccacctcctgggtccaagtgattctcgtgcctcagcctcccaagtagctgggactacaggcacccgccaccatgcctggctaatttttgtatttttagtagagatggggtttcaccatgttggccaggctagtctcaaactcctgacctcaaatgatctgcctacctcagcctcccaaagcactgggattataggtgtgagccactgcacccagctgattttagtatttcttataattttgttagcattttgcgtgcttttaggggcttggttttttttttcttttttaatgtgtctctctgtgtgtgtgtgttttgttttgtttttttgagacaggttctcaatttgtcatccaggctggagtgcagtggcaagatcatggctgacagctcactgcagccttaaactcctgggatcaaatgatcctcccacctcagcctcccgagtagctgggactgcaggcccgcaccaccatatccaactaatttttgtattttctgtagagacggggtctccctgtgtcgcctagatgagtccggaactcctgggctcgagcgatcctcctgcctcggcctcctgaatgctgggattacaggaatgagccactgaacccggccttgtattatattatttattattacaattttggcagatggtgctaagtctcttgccctaagagagccatatcatatgatacttttccaacagatggcagtgaagtgacctgagacagcagcacctcctttttttttccagatggagtttcactcttgttgcccaggctggagtgcaatggcacgatctcagctcactgcaacttccacctcccgggttcaagagattctcctgccttagcctccccagtagctgggattacaggcacctgccaccatgcctggataattttttatatttttagtagagatggggtttcaccatgttggccaggctggtcttgaactcttgacctcaggtgatccacccaccttggacccccaaactgctgggattacaggcttgagccactgcatccagccaaaagtagccccttctctgagttcaccaagtgcgccatatgggccacagtcccaggctcaggactacaactcccagcagcccatgcctctcagaggctctgccccaccctagaggcctcctgggagttttgttctcctagggagccaagtacctggacctcatcctgagggtggtggaccaccagcgcgtaggccagggtgtcctcagacagcggggagaagttggcctgggccagcaggggctccagagcccgaagcacctcctgctcattagacagacgctggggatccgttagtgatggctgatcgagggtctccctgtcagggttgatggggtcatataaggcctaagaggagagtcagagagaaaaagatgggataggtctctgcatgaaggattctagggacatctaaggacatccctctccagatactttcatttatttatttatttatttatttattttattgagatagagtctcgctctgttgccaggctggagtgcagtgtcacgttctccgctcactgcaacctccacctcccgggttcaagcaattctcctgcctcagcctcccaagtagctgggactacaggcgcacgccaccatgcccgggtaatatatatatatattttttgtattttaatagagatgaggtttcactgtgttgcccaggctggtcttgaactcctgagctcaggcaatatgcccgcctcggcctcccaaagtgctaagattacaggcataagcca[137 bp omitted]tgtctcagcctcctgagtagctgggattacagatgcacgccaccatgcccggttaatttttgtatttttagtagagaaggggtt[132 bp omitted]gatggagtctcgctctgtcacccaggctggagtacagtggtgcaatctcagctcactgcaacctccacctcccaggttcaagcagttctcctgcctcagcctcctgagtagctgggattacagacacatgccaccacattcagctaatttttatatttttagtggagatggggtttcactatgttggccaggctggactcgaattcctgacctcaagtgatgcaaccacctcggcctcccaaagtgagattacagacatgagccactgtgcccagcagattcttttcttatcacacccatatccaatcctctggcaagttcacttgctaaacccctgaatcttcttgaatccaccctcctctctatctcctttgctgctatcttctcactgaagccaccttcatctctcacttaaacaattatgtagggcttctgttccccaacttttactcttactactttctttttatttatttatttttttgagacagagtctcactctgttgcccagggtggagtgcaatggcatgatctcagctcactgcaatctccacctcctaggtttaagtgattctcctgcctcagcctcccgagtagctgggactacaggtgcccaccaccacgcctggctaatttttgtatttttagtggagatgaggtttcaccatgttggccaggctggtctcgaactcctgacctcaagcgatccccccacctcagtctcccaaagtggtgggattacaggcgtgagccatcgcacctggcctactcttgctacttttcaaccagtatccacatggccattgggaagaacttactgaggctgtaaacagctcccacaatccacccctccaacagcttcccactgtatttagaataaaatctagaagctttccgtgatgttcaagttccctcacaaactggcatctaacctgcctgcctcatcttatgtccctaaacgtcccccctaaaaaactcttggaatgaatgtcgcgtgagtttccagttgcctagcctattttgctcacggagagactgagtctcaggatgacatataacttgtcccagactctacaacagcctccaaggaaatcacccctctataaaaccagatcataaacctaaccctccatgtgtctcttgggagcaggggtcctatgaagcagcttgttcaggccaggtgcgattctgaattagtggaaggagagagggccggttctccaagtgggaggaatggcctaagtgaaggtttggtcatggggaagcccagggcctcagaaacaactgagcaaggagactgggatgcagaagagattcaaaggccggcacagtggctcacgcctgtaatcccaacactctgggaagccaaggtgggaggatcacttgaatccag[140 bp omitted]ctcccaggttcaagcgattctcctgcctc[135 bp omitted]gcctcccaacgagctgggattacaggtgtgagccaccgcatctggtcttttttttttttttaattagccaggcacaatagtgcatgcctgtggtcccagctacttgggaggttgaggttggaggataacttgagcccaggaggttgaggctgcagtaaaccatgatcgtgccactccactccactccagcctgggtgacagagcgagaccctgtctcaaaaaaaaaaaaaaagaaaaagagaaagagtcaagccaagaaaatcctcctctgaagtaagccctagggctgtgcccacatcctccagcctaggctggtcgagcagttctgggacttacagagtgaccttgagaaattccattcccaggctgagctgcagtttgaaagctggagaaagaaatctgcattgatcaaatgtccactgtgagccagattctcttctggaaacttcacatcctcccagggctttgggccaaaaacctggacattgcacgtgatccctgttgctcccttccctgtcacaataaatcctgccgattccaccttcaagcagaccgcacttcacccagctctctcctccccacccgcctggtcccagtccatgccagccaccaccatttcatcctgcctgggtgagcccaacagccttctcaatagtctccccaaatcctgtaacacacaccatcccctgccaatcggttctttacacagcttccagggagatctcgtcaaacaataaaataacaacaatcatcatcaatgataatggtgcacatttacatagcacttactgtgtgccaggcacagattgaagtatgttacacgcacattctcacagtgtgaaactcctcatttacagatgtggaaactgaggcacagagaggttaagtaattgcccgaggtcacatggccaggaagtggtgtaaccagaatgacacatttgaccatgtcaatctcctgctaaaaccctcccaaggcttctactgccctcgggaatcaggatcacacttcctagtagggcctgcaaggcctcacaggaccgtaaatcccctcggtcactccataccatccagactgtctttaggttggctgggcgcgattgctcatgcctgtaatcccagtagtttgggaggccgagagaagaggattgcttgagcccaggagtttgaaaccagcctgggcaacacagcaagatcccatctctaccaaaaaaaaatacatttatatatataaaaattagccaggcgtggtggtgcacacctgtggtaccagttactcaggaggctgagggaggtggattgcttgaacccaggagattaagtctatagtgagccatgatcacagcttggcactccagcctgggcaacagagaagaccctgtcttcaaaacaacaacaacgacaaaccagattggttttagttcctccagccacagagactttgcacatgctgttggaagactctctctacacccttcctgcctccttcccttttcaccattgaagtcttactctctgtcatattctaggtccatcatcactatcaaaaagcctcggacaggggcagtggctcacgcctgtaatcccaacaccttgggagaacaaggcaggaaggactgcttaaggccaggagttcaagaccagcctgagcaacgcggtgaaaccccattgctactaaaaatacaaaaaattagttgggcatggtggcgggcgcctgtaatcccagctactccggaggctgaggcatgggaatcacttgaaccctggaggtggaggttgcagtaagctgagatcgcaccaactgcactccagcctggacaacagagtgtgtcagtgtgtgagtctctggctcaaaaaaaaaaagcagcagccttcctctactcatcaaactgagcagggccaccctgtgtggttgggcaggatgtacactgcacaaagataccagatctaagggcagacctgtccatttatcatgacagccacccttcagatggaaataaaggaacagaatagcaccatccactagaactccctgcagtgagggaaatattctagatctgcaccatccaataaggtcgacactggccataggtggctactgagcacctgaaacatgatcagtatgctgagaaacaaaatttg[134 bp omitted]cctccgcctcccgggttcaagtgattctcctgcctcagactccggagtagctgggatcacaggagcccgctaccatgccagctaatttttttttttgttgtacttttttttagtagagacggggttt[141 bp omitted]acagttccaggctagagaaagaggcacctttttctaatttgcacatggaccccagtatagcaaccaaggttcaggttcactctgttatccccctgcagggcaccatgcccatcgccctcatggtctgaacttaaccatcactggggagagcatctgattcatgaccgtccccaccacccacgttcagctcccagagcgcacgatgcaggcccagtttcactcctcagtgaagacacagcacctggcaccgg[136 bp omitted]catggtgaaaccccgtctctactgaaaatacaaaaattagccaggcatggtggtgcgcgcctgtagtcccagctacttgggagactgaggcaggagaattgcttgtactcaggaggcggaggttgcagtgagccaacacagtgccactgcactccagcctgggagacagtgagactacatctcaaaaaaaaaaaaaaaaaaaaaaaaaagaatgacttaattgggtctttgtggcaattgctgctgccatattccaccatcaagcattcccttgtggctgtcacatgccatctgtctactgaggactcccagatttccatctgcagtccagatatctcgcttgagctccagattcacacggctgggcgtctactcaatacttccatacagatgccccatgggcctctcaacacctccgcaagggcatcctctcaaacccacgatgccccaaacctgctcctctcagccttgtccccatctcaaaagatgcaactccatccttccaggtgctcaggcccaaagcctgggggtcatcctggagtcttccctttctcacacatccaacccattggcaaatcgtgatggtaacacattcaaaacagatgcaaaatctaactgcttctcaacccttggtctcagccaccctcctccctggcctgggagctgttctccccgccccgtccccatccccagtgggttccccaagcagccaccagagggcgccagtttgcacctacagcaattccagtctttgcttagaacactctgcttagccaccgacccactcagtcaaagcaaagtcctcaccaccgcccaggggggccctgcaagatctggccccaggtccccctccctctgccctcacctcctctctcttccctgggtcgccaggctctagccccgcaggcctcctggctgttcctccacacaccatgcacactgctgccccagggcctttgcacgtggagttccctcacatctccatagggcttgctcccctctccttcaggtctctgctcaaatgttctctgctcagtgaggccttcctgaccaccttacctgaaactgaaaaacaccccctcccttgctttccttttctccttattaggttttgaaaaaaagaaaaatacagtcatcccttggtatccataggacatcagttccaggatgtcccatggatacccaaacctacagatgctcaagcccctgatataaaatgacatgtctgcagccgggcgcggtggtttacgcctgtaatcccagcattttgagaggccgaggcgggcggatcacgagttcaggagatcaagaccatcctggctaacatgatgaaaccctgtctctactaaaaatacaaaaaattagctgagcgcggtggtgggcgcctgtagtcccagctactcgggaggctgaggcaggagaatggtgtgaacccgggaggcggagcttgcagtgagccgagatcaagccactgccctccagcctgggtgacagagtgagactctgtctcaaaaaaaaaaaaaaaacaccatatctgcatataacctctacacatcccctcatatactttatttttatttttttagagacagggtctagccctgtcccccaagctggaatgcagtgctgcaatcatgacttactgcagcttcaacctcccaggctcaagcgatcctcctgcctcagcctcccaagtagctgggaccacaggtgtgtgccaccacgcacagttaattaaaaaaaaaaaaattatggaggccgggcacggtggctcacacctgtaatcccagcaccttgggaggccg[133 bp omitted]tgaggcaggagaatcacttgaacccaagaggcagaggttgcagtgagccaagatcacaccactgcactccagcctgggcgacagagcaaaaatctgtctcagaaaaaaatatatatatattttgtggagacagagccttactatgttgtccaagctggtctcaaactcctgtcctcaaatgatcctcccacctcagcctcccaaagtgttagagttacaggcataagccactgtgcctggccacgtatactttaaataatcatctctctctagattacttataacaccaaatacaatgaaaacattatgtaaatagttgtaatgctacattgttcagagaataatgacaagggaaaaaaagagtctgtacatgttcactactgatgcaatttttttcccaaatattttttatccacagttggttgaattcacagatgcagaacccatggatatggagggctgactgtgcaggacaccacttacatctgaatttcagatcaacgacaaactttttttttttttttaaacggggtctcactctgttgcccaggctggagtgcagtggtgtgatctcggctcactgcaacctctgcctcctgggtgcaagcgattctcctgcctcagcctccacagtagctgggattacaggcgccagccaccatgcccagctaattttttttttgtattttagtagagacgggttttcaccaggttggccaggctggtctcgaactcctgacctcaagcaatccacccgccttggcctcctaaagtgctgggattacaggtgtgagccaccatgcccggcccaacaacaaacgatttttttagtttaactacatcccatgcaatattggatgactgtattgcataggacacacttccactgtactaaaaaattacacatagtttatctgaaattcaaatttactgggtataatgagttgaatgttgtcccctaaaaatttacatccctttggaacctcagaatatgatctcattcggaaatagggtctttgcaggtagaattaaggtaaagatacagatgagatcatactaaattagggtggaacctaaatccaatgagagtgtccttataagagacagaaaaggacacacataggacaccgagaaggcagccacaggaagatggagacaggggttggagtgactcatctacaagccaaggagcaccaagggttgctggcagctacaggaagccaggagagacaccatagatgcttccctctcagggcctccacaaggaaacatcttttaatacatttcacttcttttttttttgagacatagtctcactctgttgcccagactggagtgcagtggtgcgatcttggctcactgcagcctccgcctcccgggttcaagtaattatcctgcctcagcctccggagtagctgggatcacaggcatgtgccaccacacccagctaatttttgtatttttagtagagtcggggtttcaccatgttggccagattggtctcgaaatcctgacctcatgtgatccacctgcctcggcctcccaaagtgctgggattataggcgtgagccaccgcgcccagactttttcttttttttttttttttttgagacatagtcttgctctgtcacccaggctggagtgcagtggtgcgatctcagctcactgcagcctccgcctcctgggtgcaagtgattctcctacctcagcctcccgagtagctgggactataggcacccgccaccacacccagctaatttttgtattttcagtaaagatggggtttcaccatgttggccaagctggtctcgaactcctgaccttaagtgatccgcccacctcggcctctcaaagtgctggaataacaagcgtgagtcactgtgcccggccaaatttcacttctgtaccttgttgctggtctcttcctcagtagaacagagcctgtgaggtacatctctcatgctgtccactgtctcccagagcctcaagccattccagagacacagtaggtgctcaataaatatttactgagcgaactcaatgaatgaatgaatcagcgaaaaaagatcagagagaggtcacccgccaaggtcacccgcaccactagtgaacaaccaagctattgtttgaaccgaggctatgctgcttctttccctgcccaggccacatcttcaaaggacttaagtcatcagcaaatggtcacccagcgggcctcacccgcctctgccacttctaccctgcccctgcctctgtttaaaatctcctgcctgggagatatatgcttattcacttatgttctttctacatttctatatatttatacatttctataataaaataggctttttttaactttttttttttaagaatcttgctctgtcacccaggctggagtgcagtggcgtgatcttggctcactgcaacctccacctcccgggttcaagtgattctcatggttcaagtgattctcatgcctcagcttcctgagtagctgggactacgggcaccccccaccacaaccgactgatatttatatatttagtacagacagtttcaccgtttgccagactggtctcgaactcctgggctcaagtgatccgcctacctcggcctcccaaagtgctcagatcacagacaagacataccaagcccagccttaacttttaaaaaaatagaaaaagaaaaaaacaaccgtggctccagaggccataggtgccctgtggaagagcttggaggcaggcagacgggggcttgatctcgactccaccaattatgaactgtgtgatcctgggcacaacccgggccctctgagacattcagtttctccatgtatgaatgggctgatggcggctgtctctccgcactgcaggaaggagtcaataagccagacacagcaagcgctcagcaacaaggggctgtgatggccactgttgctggggttgttattattcaaagcaaagtgcggagctgcagaaggcagtggtgggatgtggcgaggggtgaatgcagcaggcctgggttgtccaaaccccgcacattccaaagaaaggaccggccctggaccagcttctgggagggaacctctaagcccttggaatgtcctgactgataagagtgtcttggtttacctggggcctggggccacactggatgctgtgtgttaatgttgtcatctatggtcagggcctggagccactgagcatcagtttgacctcggaggggctggagtctcaggtcagccaccatgcatatgtgactgacccccagtaaaaaccctggccacccaggcttacaggagcatccctggttggcagtactgcttgcgtgttgtcacacatcttgctgggagaattaagtgccgtccatgactccaccgggagaggacagctggacgctcacgcctggtctgtcttggattctgccccatgtgcctttttcctttttttttcttttttttttttgggatggagtctcactctgctgcccaggctggagtgcagtggcacaatctcagctcactgcaacctccgcctcctgggttcaagtgattctccttcctcagcctcctgagtagctgggattacagctactgggattacagcgccactatgcccagctaatttttgtacttttagtagagacagggtttcacc[133 bp omitted]ctctgtcacccaggctggatagtgcagtggcaaaatctcagctcactgcaacctccgcctcctgggttcaagcgatctcctgcctcagcctcccaagtagctgggattatagacatgcgctaccaggcccaggtaattttttttttttttttttgagatggagtttcactcttattgcccaggctgcagtgcaatggtgcgatcttggctcactgcaacctcctcctcccaggttcaagcaattctcctgcctcagcctcccgagtagctgggattacaggcatgcaccatcacacccagctaattttgtatttttagtagagacgg[145 bp omitted]ctcactctgtcacccaggctggagtgcagtggcgcgatctcggttcactgcaagctccgccacctgggttcaagcgattctcctgcctcagcctcctgagtagctgggatgacaggcacatgccaccacacctggctaatttttgtatttttagtagagacggggattcatcatgttggtcaggctggtaatttctgtatttgcagtagagacagggtttcgtcatgctggcaaggctggtctcgaactcctgacttcagctgatccacctgctttggccacccaaagtgctaggattacaggcgtgagtcaccgcgcccggcagtactaccatctattaatagatcctcccacagcagtttctcagcccagacctctcccttcacctccagatccacatattcaagtctatctttctttttttttttttttttttttctgagacggagtctcactctatcgcccagctggagtgcggtggcgcaatcttggctcactgcaagctccgcctcccgggttcacgtcattctcctgcctcagcctcccgagtagctgggactacaggcgcccgccaccacgcccggctaatttttttttgtatttttagtagagacagggtttcaccgtgttagacaggatggtctcgatctcctgacctcatgctccgcctgccttgtcctcccaaagtgctgggattacaggcatgagccaccacgcccggcctcaagtccatctttctacctgcctttctaaaaggcagctcaatggataaagaaaatatggtctatatacaccatggaatactactcagccataaaaaggaacaaaataatgtctcttgcagtaattggatggagttggaaggccattattctaagtcaagtaactcaggaatggaaaaccaaatagccgtattctcactttataagtggaagctaagtaagctatgagggtgcgaagatacacagagtgatataatggaatttggggactcagggaggggggttgggatgggggtgagggactacatattgggtatagtgtacactgctctagtgatgggcacaccaaaatctcagaatgcaccactacagaattcatccatgtaaccaaaaagcacatgtaccccaaaaactactgaaataaaaaatgttttaattaaaaaagaatgggccaggcacggtggctcacgtctgtaatcccaacactttgggaggccaaggcaggtagatcacgaggtcgggagtttaagaccagcctgagcaacatggtgaaaccccatctctactaaaaatacaaaaattagccaggcgtactgacacacgcctgtaatcctggctattcgggggactgaggcacaagaatcacttcaacccggaagacagaggttgcagtgagccaagatcgcaccattgcactctagcctgggcagcagagtgagactctgtctcagaaaaaaaaaaaaatatattagaataaataaattcataaataaatggtagctcaaattcttaagtccaaaactgagctctcagtcctccctgcagatctttctccccatcccaccacggtctcccccatcccagtaaatggcagctccatcctccaggaggctcaggccagaactgctggagacgcacccctactcctctctcttcctccccagaacacccccacagccagcacatcagcaaaacgctgatgccttccaacataaccagcatctgaccgtttttcaccatttccatcgctattacccttgtcggagcttccattatctctcccctagacaaatataatagactctttcatagatgtccctgcctctgatagtctgttccctacactgcagccagagaaatcctgttaacacctaaatccgctgctcacatctctcctcagctcagagccctcccatggctcccggctcactcagagtcaaagcaaggtcctcggcctggcacagtggctcacgcctgtaatcccaacactttgggaggccaaggcgggtggatcacttgaggtcaggaattcaagaccaccctggccaacatggtgaaacccagtctctacaaaaagtacaaaaattagcagggggaggtcgtggacgcctgtggtcccagctactcaggaggctgagggaggagaatcgcttgaactggggaggcggaggtttgctgtgagctgagatcgcaccactgcactccagcctgggcaacagaacaaaaactccatctgagaaacaaaaacaaacaaacaaaaaaacaaagcaaggtcctcacagtggcccacaaggcccagtacgatctgtccccatcccctctgccctcatatcccaccctccccgcacattcactctcctgcagccacagtggcctcctcactgttcaatactccaggcctccactcacctcagggcctttgcacttgctcttccatctgccaagaacatcctcccccaggcattcatcaggctcgttccccctcttcactaagcctttagcccacatgtcacctccttggggagcccttccccacccaccccgtctgaaacaggccccatctcacccctctttgttttttttttttttttgagacagagtttcctcagtcgcccaggctggagtgcagtggcgcaatcttggctcactgcaagctccgcctcccgggttcatgccattctcctgcctcagcctcccgagtagctggaactacagtcgccccccaccacgcccagctaatttttttgtatttttagtagagacgaggtttcaccg[139 bp omitted]tggcacttatcaccaccaggcatcatattttatatttatttgattccttgtctccccacttggaatgttggctccatgagggcgtcacttcacctgtcatgttcactattgaatccccagcacttaaaataagggccaggctccaagaaggtgtcagggaatgtttgctaaatgagcggatgctcgaacaagcaccacagggctggaagggccccgtcctcacctgcagccgggccaggatttggtggtagtggaacagggtgcagaagtccacgtgggccgagaacgcctccaaagccgccttctctgccggactcgagtggaattcctgttacctcaggaagcaaaacttctctgtaggccttttccccttccccgagggaaagaattctttccctggctgcctaactacacaatca[132 bp omitted]aaatcctgtctctactaaaaatacaaaaattagccgggcgtgatggcatgcacctgtagtcccagctactcaggaggctgaagctggagaattgcttgaaccagggaggcggag[131 bp omitted]gccaaatatagtgaaaaactatactgggcttaaaaagctggaggttcaagtttttgctttgacatttcctagccaatacacacacacacaattccaggaacggtttgacagtgtaatatcatcctccagaagtagatggaattattattattattatgttgagacagagtctcgttctgtcacccaggctggagctcagttgtgcaatctcagctcactgcatcttcaacctcctgggatgaagcgatcctcccacctcagcctcctgagtagctaagactacaggtgcccaccaccatgcctggcgaatttttttcaattttttgtaaaggtggagtctcactatattgcccaggctggtctgaactcctgtgctccagcaatcctcccacctcagcctcccaaagtgctgggaggctgagccaccatacccccaaggttgatggaattataactcccatttgtcagtgggagaaactgaggctctggaaaagtcatttggtaagggctgcagtgtctgtgggaaatgactgctatctaggcctgtctgactccagggtacacattgaaccatttcctttttttttttttttgagaaggagtctcactctgttgccaaggctggagtgcagcggccatgatctcagctcactgcgacctcttcctccacggttcaagcaattctgcctcagccttctaagtaactgggattataggcgcctgccaccacgcctagctaatttttgtacttttaatagagacggggtttcaccatgttggccaggctggtctcaaactcatgacctcaggtgatccacctgcatcgacttcccaaagtgctgggattactggcgtgagccaccatgcctggccttgaaccacttcttcttctttttttttttttgagatggagtcttgctctgttgcccagactggagtgcagtggcacgatctcggctcactgcaagctccgcttcccgggttcacaccattctcctgcctcacctcccaagtagctgggactacaggagcctgccacctcgcccggctaattttttgtatttttagtagagacg[148 bp omitted]attgtcttcacttctctgagcctcagtttcctcactggcaacagaggattacacgctctttcttggagggctacggtgagaatttgatgagattacacatgtcctatatacacatgtgtttacatatatgtgcatatatttgtatatttatgtgtgtatatttgtgtacttttgtgtgcatatatttgtgtgtgcgtgtatttgtgtgtgtgcatttgtatgtgtatatttgtgtatttgtgtacacatatttgtgtatttgtgtgtgtacttgtatgcatatacttgtgtgtatttgtgtgtgtgtatttgtgtgtgtatcaagtccagcacagaattgagtacatacagtaggtgttcagtaaataaatgttaaattaatgaatgatggtgaggtgtggtggctcatacctgtaatctcagcactttgggaagccaagatgggcagatcacttgaggccaggagttcgagaccagcctggccaacatggcaataccctgtctctactaaaaatacaaaaattagccaggcaagagtcccagcctctcgggggctgaggaaggaggatcacttgagtctaggaggcagaggttgcagtgagctgagattgtgccactgcactccagtctgggcaacagagtgagaccctgtctcacaaaaataaataaagaaaaataaatgaataataatcctcaaaatcctcaataatgacaatgatgatgatggtggcaataagacctcaggttctagagtgagaccaagactaggatgaggtgaatatggcacccaagggtgcaaaatttaacggggcactcactcttagggtcaagcgagtgccctacttgcctaaccctagtcctgggccagctctggagtcagaccactttggttcaaatctaagccactatgttgtggccttgggtaagtcactttccttccctatgcttccattatctcatctgtaaaatggggatgatggtggtatctctcttactgatgattcaacaatacatgaaaaatgtctggcacagtgccatggagtcagagctcaaattgtgtgataataattatgattacagcgttgtgactttataggtacaattattatcaggtagtagaaatagtaatgatgaggatgattactatacccatcttaaagagggaaaaaccatgccccagagagtgcctgttcaagccctcagaacaagccagagttgggaatggatgctgcgtctgcatctcggagacctggctcctgcattccagctcatctcccgcccactagggaaacacgaagggacccgggaactacaactcccaggaggcgccagggcagctctctgcagcaactagggccctgccgccgcgaagcctgctgggagccgtagtccccaggctcttgggcctgggacaggcggtacctgtattaggaggcggagcagctgctccttggagaagggaatgaagcgctcgcggtactgctgggcccagtcgcggggctccctggggttccacatcttgcgatactcccccattttggctgccagcgatgagagggcccgggggggcccgaggagcgcgggcaacagtggccatactcggaccctggacccccagaccccccgggtcacatgcagcatggctagaccctttccccggagcctaaacagaggaaaatgggcaggggtcaaaggccatctagaggaaaagcgccctctccacctccacgtcccaccctccagaagccgtctctaccccaggcagggcgcagagcccatccgctcgcctcaaagcccctgttgcctgtccccttcccacactgctcagttggcctgggtcccagacaggggtcagaggtcttaggttctggggcgtttttcaggcccagagaccctgtagtggtacaacgtttctttggggtctagacagcgaggtagatcttaggagagcaggaaatgctcgtaaaggttacctagggggtgcagggccgccctccctggccatgcaatcccccgatttctccctcaccttagccaaagctcgactgtcattgagcctcctgcgcatgtgcaggagggcgtcctgggctcccgaggttcggcttcacccagcagtaaaacgcatgcgcaaagcttcggtcaatgcgggctgtccatttctcaccgccgactccctacatcaactacgcatgcgttgcctgcctttctccaccgccggcctcgtttgggcgcgacgcatgcgccgcaggagtgtctccttgtcagcttgctacaaagggaaggggcggtgtggacgcgagactccctagagggatggggcggggtagggctcccgcgcgcagtccgccaacggcgcgcagtccaacgttcgccgaggccacgccccggctcgtgtcagctcctgagtaggcggaaagagggagggggcgggacttgggcgcagccaatcagctgtggaggagcgaaaaggcgggaaaaagcggaaccaaaagaaggctgaggtggcgctagggaccaggaggggtgggggtggcgaaaggaagggcgggccctcaggtgacgcagattggccctccagagaaggggcggccccttctcaggtgccgtcacccccaaacctcagcactgccattccaggtccttaaaggggagaccgcgattctaagaaggtagcccagtgccggggcgtggcctcattctgaggttccccacaaatccgaggtcccgactcccagcttgaggaggtgcacttccgtgaaaatggagctgaattcgaaagggaggcccttattctgggaaatggccccaagtgacaaggacagcctgaaatatgccctgagatacctgggttctccacgaagggtgctgtcacccccaaacctgaaagggattattcggtttcagacctcccaggggctctgatctcaatggccgcaccccctagtccccagaaagtcccacctgtgtcctctcacagaaggacccagtccctctgcaggcccttcagctcctgggtcacaagacgtggtccccaaatatcccagccctcccctgcactccacctctgggatccctgacagccctctcgcccaacaaccccctcagcccacattcctgacttctggaacctgaagcagccccttcacttatgtcccccactcctgggacccccagaatcaccctcaccccaggccctcacctctctggaatcctccatagacccccttaacccacacctcaacccaggggacccttagcgactctctcatcctgcacctccacctctgtgacccctggcagccctccccacacgacaccttgcctgggacccctagtatccccatcctatgcccccctctcctgggacccccagaaagctccctcaccacacacaaccccattcctgggaacccccagcacccgcatcctatgtcccccacttcagggacccctagcagccctctccacacaacacctttcctgggaccccccagaacccccatcctatgcctcccacttctgggacccctagtagccccctcaccacacaaccccattcctgggacccccagcacccccatcctatgccccccactcctggggcccacagaagccccctcagcacacacaacctcattccctgggacccacctgcacccccatcctacgtccccgacttctggggcccctgacagcccattcaccccacaccctgactcctaagaggctcagcagtcccctcaccccacacaactccattccggggaccccccccatccccaccccatgtcccccaatcctggggcccccaacagcccttccaccccgtgcccctgactggcatcccccatctgtgtcatcccacagcagccaagcccagggctggcctgaagcccccggacggcagtgcccagcaggcagcgcccagcaccctggctcccacctcccagtggccccaaaggaaaacagctgccatgcacatccccaaaagcctccaggagctggccaacagcgaagccgtgcagtttctgagaaggcccaagaccatcacgcgggtcttcgaaggggtgaggccctcccatggcccgactgtgcccctgggtgacaggagccaggagctctcaactcccagacacagtgcgggagatgggaggacaaggaaggggtcagacggggaaacaagacaacggagcaaatgctgacaccaccttttcctgagcaccccactataggccctatgctattgaggcactgatggactctcatagtaaggaacagccctcacagtaggtgctgcaagtcccatctctgagataacaaaactagggcttagaaaagttaagtaaattttttttctttgaaacaatcttaattagccaggcatagtggcacacacctgtaatcctagctactgaggaggctgaggcaggagaatcactcgaacccgggtggtggagtttgcagtgagtggagatcataccactgcactccagcccaggcaacagagccagactccatctcaaaaaaaaaaaaaagaaaaaagaaaagaaagaaacagtttcgctctgttgcccaggctggagtgcaaaaagcagtggcgtgatctccgctcactggaactccacctcctgggttcaagcgattctcctgcctcagcttcccaagtagctgggattacaggtgtgcgccactgcgcctggctaatttttgtatttttagtagagatggggtttcgccatgttggccaggctggcctcaaactcctgacgtcaagtgttctgcccacctcagcctcccaaagtgctgggattataggtgtcagccaccgcgcccagcctaagtaaattttttaaatctgggatgtccagtggggtagccacagccacatgtggctacctcactttgcactaattaaaataaaagtccattcttcactcacagtggccacattttaggtgctcaacagccacatgtggctggggactctcatattagacagtacaggctgggtgtggtggttcatgcctgtaaaaccagcaccttggtaggccaaggcaggcagatcatttgaggtcaggagttcgagaccagcctggccaacatggcgaaaacccatctctactaaaaatacaaaaattatccaggcatggtggcgcaagcctgtagtcccagttacttagggggctgaggctcaaggatggcttgagcccatgtggcggaggttgcactgcagcctcggtgacagagtgagac[135 bp omitted]cccatctctactaaaaatacaaaaaaattagctgggtgtggtggcaggcgcctgtggtcccagctactctggaggctgaggcaggagaatggcgtgaacccgggaggtggagcttgcagtgagccgagatcacaccactgcactgcagcctgggcgacagagcgagactccatttaaaaaaaaaaaaaaattagtgcagatatgggacattttcatcatgccagagagttctattagacagcattggctaaggtcacgcagtaacaggcaggggcaggattcaaactcagatctgtgagatgccagagcccatttattttccacctcccagttgagggaggaggagaaggagaggaacaggggctggggcttctaggaagagaataaggagtgcagccctgaagtgccagatgttgggtggtaaccgtgtgccaggcaccatgccaccgttcatttcatcatccccacactcctgaagaatctggacacctggagtcaaatcctcattcagcccagactttgctgtgtgatcttgaaccaatcactgttcatctctggatctcagtacatgaagggttagggctgtggctctgacctttaacctgtgctgcttccaccactccgctttaacagaattggaaactaaggcccagggagatgttgagacttgatcgaggtcttaggagtaggtggagttccccggctcagacccagggtctccacccccagagtgctaatccagagtatctcctctctgccccttctagagcctgagcttggagaaggaacaaacaggcctggaatcctggctcaggcacgtgctgtccatgcaaagtggcatactgcccagtttacctgggccaggcctgatgtccttaccagcagcagcaactttctttctcaaaagtgcccctttggtttgatggcttgcctggtcaccctgtgtccgtgtgaccctgagcaagctatgtgatttctctgaacatctccttactctcgtctgtaaaaagaggatcctaataatctactcctaggaagaatcattgtgaaaatgtaacaaattaatgcctataaactgattagcatgggccaggcaagtagtgatctttccttagtgatttttttttctttttctttcttttttttgagacagacccttgctctgtcacccaggctggagtacagttggtgcagtctcagctcactgcaactttcgcctcctgggttcaagcaattcttgtgcctccggagtagctgggattaccagcgtgcaccaccatgcctggctaatttttgtatttttagtagagatggggtttcaccatgttggccagactggtcttaaactcctgacctcaaatgatccacccgcctcggccttccaaagtgttgggattacaggcgtgagccaccgcacccaggcttaaatagtgattattatcaaaacaaatcattaccgtgtgtgaggagagggcctaggatgattgagatttgtgtccgttgtcctcccccagggaaagaggggaatcttgaaaaccgcatcccagcaccagatctttcgctggtgttagtttctctactcctcaccacaaccctgtgacacaggcattatgatccctgtttaacccaaggggaaactgaggctcacagaggttgagtggcatgcccaaggacatcacccagctggtgagcaagtccaactcggatccacccacctatctggaaagcctcggaaggcagggcgggtggcaaggagacggaagcccagctggtgtggactggtgcggggaaggaggaggaagagccgccaaccatgccagacgttctggtcacggactttgcccgccgcctccttccaccgtccctacccccccgccctctcctccttcccccctggcctggctcctcagtagggagtctctgggcagctggtgctcttgtcctcgctgccgcctgccagctggtgccttaactgataaatctttgctccctccctagggacaggccagggagggcatggaaggagtttggactgaagcttaagagggatagggtccctctagcccagatgagcccctgctcctcaaatctccagtgtcccgggctcatgtcacagcccagggttttgggggtcagtggacagacagcccaccggcctagatgtcaggagggctagattccaatccccctttcaccacttactgaccttgagaggacgccttccctctctgggcaaatcacaagaatgaccattttcctgagcacctactagagccaagcccctacccccacattcctccttttcatagcatagaaacagaccaggaaactgaggctccaagagatgagtgatttgccccaggccatacagctggcacagtcagaagcatctggctctttccactccaccaaaatggcttcgatttatcacctgtgaaacagaaatgaattaataatctccaccacgtggggccggtgtgaggttccagggaggtaacgcaggtaaaatgaatatgggctcaaaaatgatcaatgtgctttcttgtcctcgacctgactctgcctcagaccagcagggccagacacaccccctctacagtcagttcttctgctccaaaatagggagaatcatcttacagcctccctccaagggttgctgtgcagatcaagtgagatgatggatgtgaatacccttggttattgctgaagggctaggcaaaaacagggagtcagggtgttgctgctgttgttgttcacagaaggcaattaaggcaaaggagaagggaggatggacggaagctcaggagtttaggggtccgttctttgcctcctccatctccactctgaagggcagggcaagagtcaagacaagccaaagccattcactctttcaacacacatttgctgaagtccagtctagcgctgggtgctggggatagagagcaggggcccggcaaggtggctcacgcctgtaatcccaacactttgggaggccaaggcaggaggattgcttgaggccaggagtttgagacccacctgtgcaacatagcaataccgtctctacaaaaaattaaatatgagtgaggcatggtatttcgcacttgtagtcccagctactcaggaggctgaggtgggaggattgcttgagcccaggaggtcgaggctgcagtgagccgtgatcacgccactgcactccggcctgcaagacacagtgagacactgtctcaaaaaaagaaaaaagagagagagagtcctgtgtggagcctatccaggaagagttccaattctaacgaaggggagattttctttttcttctcttttgagacagggtctcactctgttgcccaggctggagtgcagtggtgcgatcacagctcactgcagtccagacctcgtgggttcaaatgatccttccgccttaacctcccaaagcactgggattacaggcatgagccaccacaccagaccaaagagaagattttcaacagtctgtttcccttagcctacccccgccatccccaacccctatcgccaacactgccacttccaatcaatcaccaagtcctattttacacgctaaatattactgaattccccagggctctggcctcagcctttctcacctgggcctccccgcctcctctcaggtatgttggcctcttgtcttgcccacctccgatccatcagccacgtgaccccagagggcttctctaaccccaaggctgaccccagctgtcccctgcacagaatcctcccatgcataatattgaatgctttccatggctccccaagtccggctcctggccctggtgttccgggcctcttagagcctggctcccacccacttttccagcctcatctcacaccagaaccctccagtgagtttctctcttatctctgaaactgcccgctctgcagcatctggcttttccacatgccatccaccctgccgggaatgcccttcctcctcttgtctgtctgagaaactccttgttctttaaggtccagttcagaactcacctgaaatccagccctcaatctggcttccaccttgactctctcccccaccccaggccccagcctcctccccaccaccccatctacacaccagctcgtctttgtctggcacagacctgccctgctgcattgtgaccatctgggacaaatcactggggcttcaaattttcaccgaatttcgttgataggagcccccgccctcaaggcgcgtggtccagtgtgaggaagaagagcaagaggtcaagggcagactcagaagccaggctacttctgttcaaatccaggctctgacactgaccagctgatttttttttttttttttgagacagggcctcactgtgtcacccagcctggagtgcagtggcacaatcagggcttactgcagccttgacttctgggtctcaagtgatcctcctacctcagccccccaagtacttgggactacgggtgcatgccaccacactgagctaattttttttttttaagaagttttggtagatactaggtatcactctgttgcccaggctggtctcctgagctcaagcgattcctcccaccttggcctcccaagtgttgggattacagatgtgagccactgtgcttggccttttgtttgtttgttttgagacagagtcttgctctctcgcctcggctggagtgcagtggcatgatcatggctcactgcagcctcaacctcctgggctcaagtgatcctcctgcctcagcctcccaagtagctgggactacaagtatgcaccaccacacccagctatttttgtttttaatatttttgtagagactgggtctcgctctgttgcccaggctggtctcaaactcctggcctgacacgatcctcccatctcaacctcccaaagtgctggaattacagtcatgagccacctcgcccagccactggccagctaattggattcggccaactccttatcctctctgtgccccagttccattatctgaaacacagggctgtgagtagtgcccgtgtcctagggtggctgtaaggatgacctgggtgagtgtttatagagtgtt[224 bp omitted]gctgaggcaggagaatggcgtgaaccccgggggccggagcctgcagtgagccgagatggcgccactgcactccagcctgggtgacagccagactctgtctccaaaaaaaaaaacagacgagagggacagggttaccagatcagtgtcgtagtatttgtctaaaacaaaatcccgaagccaaaaaacaaggcaaaatgttaatatgtgttagtttggccaggtgacactgggtgtttcttatgtttctcttcgtatttttctgtatgcttggactatcttgcaaatgaacctaagaaattaataggaattagtgaggccaggagggaagagacagaagtcgcagagggaagggctctaagtgcctcctctcgtttagtcctcagaaccaccccagagggaagagctgagaggcagagagaataatcacgactgcaaacactgattcagctcttcccatgtcccgggcactgtgccaggcattttatatgggtacctgggtttggtggcagaaggagagtgtgggggaggcaggggtgagtgaggagagatgaaattggaagagtgagggaagcggagactctgcagggcctccaaggccaggcttcagggctgggactcagtcctgaggcactggggagccatgaggggctgtggcagggaggggcagggtgtggaaagactcccctggggccatggtggagatgtgctgaggtggggaagactggaggtggggaggctgggaggaggctggggcaagggccaaggagagcagacgaggcctgagccaggatggagcagaggggacgaggggcaggaagctgagggctctgacactgtgacaatgtcaaagagggagaggtccagacggaccagtgactgggtatacggaaagaccgacagcaccagggaggaaggaggagcagcttcagggagagactgagctcttctctggcccctggaaatccacaggtcttctccctgatcgtcttctcctccctgctgaccgacggctaccagaacaagatggagtctccgcagctccactgcattctcaacagcaacagcgtggcctgcagctttgccgtgggagccggcttcctggccttcctcagctgcctggccttcctcgtcctggacacacaggagacccgcattgccggcacccgcttcaagacagccttccagctcctggacttcatcctggctggtgagcccccaggacccccaacccagagctgcccctcctcccgctcacagccctcctggctccccagggcctcccgggcacaacccttcaccacctagccggcctccaccctgactgtcctcccagtaggaggcatctgaccacaagtggcccagagcttctcactgtgcctggcacctgctgtctcctcctggggaattatttttatccttcagaccctgggtaagggtcacctcttctgacccccagacaaattatagcagcctcccttctgccccgtgccttctttgcatttgcttccctcatttacagaaaatctctcttttttttttttttttttttgagatggagtctcactctgtcgccaggctggagtgcactggcacagtctcggctcactgcaacctccgcctcccgggttcaagcgattctcctgtctcagcctcctgagtagctgggattacaggcgcacaccaccacacccggctaattattttttgtattttagtagagacggggtttcagtg[137 bp omitted]agcctggcataagcaagcacaaaatgtgtgtccttctttggggcctgacctccttcctctcagtctgtttgatctcaactcctccccaccctgccgctcctcctccctactgggccagtcccagtgacttagggccaagggagccttagaaggtcatcgaatctagtgctgtgcaggagaactccctgtgagggtggaaatgttctgtccctgcgccttctcatgcaggagccactgaccacccgtggctattaagcacttgaaatgcagctgctggccggggacggtggctcacacctggaatcccagcactttgggaggccaaggcaggtggataacttgaggccagaagtttgagaccagcctggccaacatggcgaaaccctgtctccactaaaaatacaaaaattagctgggcagggaggcgagtgcctgtagtcccagctactcgggaggctgaggcaggagaatcgcttgaacccgggaggcagagcttgcactgagctgagattgcgccatggcaccccagcctcggcaacagagcgagactctgtctcaataacaacaacaacaaaaaaagaaatgtggccagtgcagctgagaaacattttttttttttttttttgagacagagttgcgctctgtcgcccaggctggagtgcagaggcgcaatatcagctcactgtaacctccgcctcccaggttcaagcgattctcctgcctcagcctcctgagtagctgggactacaggtgcccgccaccgtgctgggctaatttttgttttttcagtagagacggggtttcgccatgttgcccgggctggtctcgaacacctggcctcgagtgatccacttgcctcagcttcccaaagtgctgggattacaggcgttagccacctcgcctagcctaaaatcctgtgttaatgaatagaaatttaaaccgctgcatgaggccggcggctcctgtattagacagcgcaactctactccagcagctcactttagggaaggctaggagggactggggaatgacttgtgggagatgtgtcaacatagaagctaataaaaaaagtatttttcaatacctcgtggaagttcgtgcagcaagaccaccagccccatccttcccatgcctcagcagccctgcctgagtgagctttccccctgccccttttctctccctgtgacgccacagttctctgggcagttgtctggttcatgggtttctgcttcctggccaaccaatggcagcattcgccgcccaaagagttcctcctggggagcagcagtgcccaggcagccatcgccttcaccttcttctccatccttgtctgggtgaggacaagcccctccaccacccctccctaggagggcaccctctgcagggtggggttgaaagggctagaacattcctgctctcacttagctcccctgggggtcaggggtcgggggttcccccaggactccactggtcccttccaggtgccgcttcctctgagcagccacagcccagcatcagggcctgtgctttggcctagggctcctgggcagtgagcagtccaaacaccggtatcttttgtctccttcccaggccagtccccagcccagtccctctcctgacctgcccagcccaagtcagccttcagcacgcgcttttctgcccacagatattccaggcctacctggcattccaggacctccgaaatgatgctccagtcccttacaagcgcttcctggatgagggtggcatggtgctgaccaccctccccttgccctctgccaacagccctgtgaacatgcccaccactggccccaacagcctgagttatgctagctctgccctgtccccctgtctgaccgctccaaagtccccccggcttgctatgatgcctgacaactaaatatccttatccaaatcaataaagagagaatcctccctccagaagggtttctaaaaacagccctcagtccttctcatgtctgttccactctggttgcttgagtggcgagggtgggtaagaatcccacaaggtcaccgctggggtctctgcactgggtcacatttccataccatctcctggaaccatcactggg[141 bp omitted]ctgccttccaggttcaagcaattcttctgcctcagcctccctagtagctggcattacaggtgcgcacctgtaatgcccaccaccacgcctggctaatttttgtattttcagtacagacggggtttcaccatgttggtcaggctggtgtcgaactcctgaccttgtgatcctcccacctcggcctcccaaagtgctgagattacaggcctgagccaccgtgcccggccaggaagcactttcttcaggcctgttacacactaagtcctgtcaagtcactactccttgagtccccacactggccaggggagggaggcacaaggagcctcctcttacagttgaggaaaccaaagttcagagagaaaatgcttccacccgtggagagagcaccaagaggaagggccaacaaggggacccagccctgtcactcaagcccaagccctttcactcctcatggtgaccaaagactaaaaaccatggcgtgtgaggagtcagtgaaggaacggggtgctgagtccgcgaatgagattcaagggagacccttgtcttcaaatatttcaaagaatatctttggggaggaggagttttcattccaggagaaccccagtggtaagcgggggactcaggcacgggccacaaacgttcctacctgtaggagccaggcaggaaaccccagtgggtgaagcgcctattaagggaatagtgggaacagggccacatccaggaggggcagccttcactcagcgcacattcagtaacggggcctggagtttcttttttttttccgagatggcatctcgttttgcagcccagactggagtgcagtggtacaatcatagctctctacagccttgacctcctggcatcaagcaatcctcctgcctcaagccccaaagtagctgggactacaggtgtgtgccaccactcccagctaatttttcaatttttttgaagagatgggatctcactatgttgcccaggctggtcttgaactcctgggctcaagcagtcctcctgccttggcctcccaaagtgctgggattataggcatgagccaccacgcctggccagcctggggtttctagaacagtgctgtccacttgaaatctgatgtgacacccaaggggagtttaaaatagtctagtggccacattaagaaaagtaaaacaaggtggatgcggtggctcatgcctataatcccagcactttgagaggctgaggtgggcagatcacttgaggaggccagaagttcaagaccagcctgaccaacatggtgaaaccccgtctctactaaaaatacgaaaattagccgggtatgcctgtaatcccagccacttgggagtcagaggcacgagaatcacttgaaaccaggaagtggaggttgcggtgagccaagattatgccactgcactccagaatgagactctgtctcaaaaaaaaaaaaaaaagtaaaatgaaacaagtgaaattaattttaatattttatttatgtcaatatatccaaaatatcatttcaacatgtaatcaatataaaaattattagtgaggcattttccactctttggtactaagtttttgaaacccatcgtgtatttacaccaatagcacgcctcagtttggactcgccaggtttcaggggcttgacagtcacacataaccactggctaccctaccagacagtgcagctacagaaactctggtttttctacgacagtttggacatccattctgtggcaggttttaaaatgtgaaatcaggccaggtgcggtgactcacacctaaaatcccagcactttgggaggcccaactgggcggatcacgaggtcaggagttcaacaccagcctgaccaacatggtgaaaccccgtctctgctaaaaatacaaaaattaggccgggtgcagtggctcacgccagtaatcccagcactttgggaggccaaggcaggcagatcacttgaggccggcagttcgagaccagcctgaccaacatggagaaaccccatcactactaaaaaatataaaattagctgggcgtggtggcgcatgcctctagtcccagctacttgggaggctgaggcaggagaatcacttgaatctgggaggcggaggttgcggtgagctgagatcgtgccattgcactccagcctgggcaacaagagtgaaactctgtctcagaaaaaaaaaaaaaaaaaacaaaaatacaaagattagccaggtgtggtggcgtgcgcgtgtagtcccagctactcaggaggctgaggcaggagcatcgcttgaacccaggaggtggaggttgcagtgatccgaggtggtgccactgcacttcagcctgggtgacaaagcaagactccatctcaaaaaaaaaaagtgaaatcggtgggtaacaaatacaaaataaacgttgggcagtccaaacgaaacacacctgcctggggccatcgtggcctgcagagcactagttcacaaaccggacgaaaggatatgagatgtggggaatcaaatttgggttccattagtccttttttggaggcttcctgtgtggctggccctgtacctggaggtgtagaaataactatgtggtcctgctgggtatagagagaaaacagcagcagtgcagtgagacaggaagtgttctgacatggaaatgagaggactcagcactagacgtccctctggataagcatgggtgtgtcacttactgtctctgggcccaagttgtattggctataaaactaaataattagacagattttttttttttttaaagacaggatctctgttgcccaggctggagtgcagcagagtcatcatggctcactgcagcctcaacttcctgggctcaagcaatcttcccacctcagcctcctgagtagctgggactataggtaaaggccaccatgtccagttagttttttgttttttatttatttttttttttgagatggagtctcactctgtcacccaggctggagtgcaatggctcggtctcggctcactgcaacctctgcctcccaggttcaagtgattctcctgcctcagcctcctgaatagctgggactacaggcacatgccaccacacccagctaatttttgtattgtatagtagagacggggtttcaccttgttacccaggatggtctcgatctcctgaactcgtgatccgccagcctcggcctcccaaagtgctgcgattacaggcataagccaccgtgcctggcctttttttttttttttaaagagagtgtctcactctgttg[133 bp omitted]attcaaagagatgccggccgggtgcggtggctcacgactataatcccagcactttgggaggccaaggcgggtggaacacctgaagtcaggagttcaagaccagcctggcc[220 bp omitted]gaggcagagaattgcttgagcccaggaggcggaggttgcaatgagctgagattgcgccactgtactccagcctggaccacggagcgagactctgtcaaaaaaaaaaaaaaagagagatgccttggggctgggcacggtggctcacgcctgaaatcccagcactttgcggggctgaggcaggaggatcacttgaagtcaggagtgtttgagaccagcctggccaacatggtgaaatcccatctctaccaaaaaatacaaaaattaggccgggcgcggtggctcacacctgtaatcccagcactttggggggctgaggcaggtggatcacctgaggttgggagttcaagaccagcctggccaacatagtaaaaccccgtctctaaaatacaaaaattagctgggcgtggtggcgggcacctgtagtcccagctacttgggaggctgaggcaggagaattgcttgaacccaggaggcggaggttgcagtgtggtgagattgcaccactgcactccagcctgggcaatagagggagactgtctcaaaaaaaaaaaaaaaattagccaggtgtgatggtacacgcctgtagtcccagctattctgcaggctgaggtaggaaaatcacttgaaccaaggaggcggaagttgcagtgagagaagatcgcgccacagcattccagcctgggagagtgagacctgtctccaaaaaaaaaaaaaaaaaaaaaaagaggtgccttgggctgagcaggcagcaacacaacccccttccccagtcaaccccagcgagcgagcagccccgctcctgtgttttccatatcgggcttccaggcacaaatctaaacagaaggtcccttgacttaagagaaagaaacaaaaaaccggctgaaaaaccacacagcgttggttaaacacacaagctctggcatcacgaagtccaggtgcaaagcccacctttgccactcacccctctgaacctgtttcctcatccacaaagtgccccctctgtagggatgctgtgagggttgcaggagttcatctatgtaacacacagtacctggcacatatcaagtgctcaggaaacgccagctccctgcctcctcaggcttccagagccagcctccagggaagctgcagacagttaggaaggtcttagaggacatctaggaagtttgacctagtcaagggtcaaaaatccaaaagccaacaacagccaggcaggtaacgtaagtgaagaaaataggccaggtgtgaggccaatctggagagagacaaggaaaatatttcactttcctcttaacttcgcaaacaaacaaaaataaccacacggcatcagcccaataataaatgtaacaagcctgcagccaagtcctggggactgtggtgaaaagagctgcgtcccatccattcagatccagccatctgttgccacccagaaatgaggacccagcattgttagactgatggattttttttttcaagagaagccagaaatgtgaaaatctggtttttaaaggctagcgacccattctctttttttaaggaaacagaatgcctcaacaaaaaatgtcaagtgagggtaggacgggggctgcccatgtgtggtccctgacatacatgctctttttttttttttgagatggagtctcactctgttgcccaggttggagtacagtggtgtgatctcggctcactgaaatattcgcctcctgggttcatgcaattttcctgcctca[132 bp omitted]cgcctcagcctcccaaagtgctgggattacaggcatgagccaccatgcccagccaattctcctgaaggtcctctgcaaccctgagggtttggagaaccatcagacaagttctgtgccaaggtaagaagactcttcaagattctctccaaaacctcttcccagcagcacggcgaggaactgcacagctgagagtcttgggagacccagtttctcctcttcctgctcctcctaggcctcgtcgcctacagatagtcaataaggcaaaagcagaagcagaaagaggggcgggggcgggaccccatacacaccagggacagagtggcaaggagcagcaaaagaaaggtttcattttcttctgtttatttcaagagaacaaagattcaaccatcagttctgtacaaaaacatggtgtgagagccatgggatcctcgggccagcccccttcccgcacttgagccccgggcccccctaatttgccaaaaaaccaggagaagaccaaaaaattcaaactctggggaaaaaaattactatgaaaaaaaatcaggggagaccttcctgggcctccctttctccctatccccaatctagaaatttagtgggggtcgcggttcatggccatggcaggaggtggggcagatgggtgtcggcagatttagtgtttggcaaccagtggggctgggggtgggatctgggagggagccgaggggcctggggaagggaaaagatcttggaccctgccccggcccataggacactcaaaaacactttataaaaattggggccacagagtagaagaaaaacgagtcatcagaatcaaaaactaaagagtggaaagatttttttttcttgtctaaaaggcaaaaaactacaaacagcccaagtcctgagctccccaagacctggatcctccactgtccccctgaaacccggcaggaggcgggatggggagcacaagaggtgggttcttaaaaaagtcacccctggatgggaaagctcttcatcttctgccgccttcctctgcctcccgctgctgccgaggagagagatggagaggaccggggctatgccggcaaactcaacttcttcccctttaggactgtgaggagagaaaacagggagggcattaccgctggggcccctgcagggaggggacagcctcccacagccagagcagggcaggcacgctagatgggcagatccacagggagggaggtcccccaggactcacagatacattcctggtttctttccttcctaccctttctcactactggcaattttctttctttctttttttgagacaaggtcccactctgtagcccaggctggagtgcagtggcatagtcacagctccatgcagccttgacctcctcaagcaattctcccacctcagcctcccaaggagctgggaccacaggcgtgcaccaccatgcccagctaatttttttatttttttattttttatagtgacagggtcttgctatgttgctctggaactcctaggcttaagaaatctccctgcctcagtctcccaaagtgctgggattacaggtatgagccaccatgcccaactaattctttctttacttgttcattcaccatctcccccaccagaataaaagggaaatggaggcctttgtctatcttttctcctcctaatgtatccccagagcctagcacctggctggggacatagaaagtactcaatacatttgttgcatgaataaatgaatgaatttcagtgggctgagtccctgccctgcctggcctacgctccaagtgacatgggggctaaggacagaaactccttagcccttagggaggcagaggctaacggtctgaattcctaggaggatggtaggcctgccaccccagaaacccggcgaagaaatgctcccttctttgcataatacaggggtaaggagaccccagtccccagggagggcaggagctgcagaaataggaggttcccttccagccgtcccacattccagctacctttggtgatatagaggtagaagaaatcgcagtagaggactgtctggaccaggcctgccacaatggcgatgaggtcgaagaagccctcgaaatggtagcgccagatccagttgaagagatagagcgtgcggtaaacgcctagcgcaaacaagtagtggctggtgatggtctccgcctcgccggtcttgctcaccatgaacagctgcggcaagatggccactgactccaggtagatggagaaggtccagaggatctgcagagaggccggggacatgatgaggtgggaggggacagggcgggagaaaaggcagaggacaacattgcagttacaggtgccgcgaaggtggagagaaggaaggtgatccaggtgctgccaagtgccagacacagttctgcccgagttactggtacctctgatttaatcatcaccatggcccggcgaggagatcctatgattagcacacttattctacagatgaggaaactgacaccagagaaggtaagatactcgcccaagaccatgtagccagcaagcagcagagcaatgattcgaaccaaggattcgcagtccgttctcatgaacactttgcaattgcgcctctctgaaaggcaggctgggttggaatcttgccttggaaatttcccttcctttttctttttcttttttttttttttgagatggagtatcactctgtcacccaggctggagtgccatggggtgatctcggctcactgcaacctctgcctcttgggttcaagcgtttctcctgcctcagcctcctgagtagctgggattacaggtgcccaccaccacacccggctaatttttgtatttgtagtagagacagggttttgccttgttggccaggctggtctcgaactcctgacctcaggtggtctgcctgccttggcctcccaaagtgctgggattacaggcatgagccaccgtgccgggcccacatgccatttcttgtggcaggctgcatatgctgttcccacagcaggaaaagctcttcccctacactgtcacacatctgcctcctccgtattctcccagcctcagctcattagtcacctcccgagagggaccctccctggccatccttcccccaggactgtcacatcaccccatcttatctccttcctggccactcgcaccagcaattgagctctgtgagggctgggatcctacttcttgttcaccccgtggccctagcacctagcacagttcctgaatgagtgaggaaatgggagttagcatctataaaggggtccccatgtgctcagcacaggccaccatttagggagcactgacaaccatcattcatgagcaggacaggacatcatgggacagggaagaagacatctgccagccccctttcagtccccagctccctgaaagtgccacctggggtgatctgtgatctgcagacacactgaaacctcagagagcaaagccaggtggcaggtgtggctccttggttgtcttggtttgtggaaggaaggtggggggcaccaggacctattcataacaactcatgcttttctagcatttacgacatccaaggcatcgctccttagggtgttaactggcctgagccttaaccccatgaggtaggtactgttgtcattcccattctacagatgaggaaactgaggcccaaaggataagaaacgtgtccagattcccactgaagcacgtagagtccaggacctgctcccagaatcatccagaatcctccagggaggctctcgtgaagccaggttagttgatgctgctgggaaacgaacccattaaattgatgcccattcaactctcacccctggggttgcccttagggaacagagtcaccgtttaaagagagacagaaggtctgttgctttttttttttttttttcctgaggccgagtttcactcttgtcacccaggctggagtgcagtggcgcgatctcggctcactgcaaacctccacctcacgggttcaagtgattctcctgccttaacctcccaagtggctggaattataggcactcaccaccacgccctgctaatttttgtatttttttagtaaagacagggtttcaccatgttggccaggctggtcttgaactcctcacctcaagtgatccacccacctcaccctcccaaagtgctgggatcacaggcgtgagccactgcgcccagtcttgcatttttatctattccatgctgtttgaattttttttttttttttttgagatggcgtcttgctctgtcacccaggctggagtacagtagcacgatctcagctcactgcaacctctgctgcccgggttcaagtgattctcctgcctcagcttcccgagtagctgggattacaggtgcatgccaccatgcccggctaatttttgtatttttaatagacagggggtttcagcatcttggccaggctggtcttgaacccctgacctcgtgatccacgatccacctgtctcagcctcccaaagtgctgggattcaggcgtgagccactgcgcccagcctgatgtctgaatttttaaagaatattttccttaggtcaggcacggcagctcacacctgtaatcccagcactttggaaggctgaggcaggtggatcacttgaggccaggagttcaagatcaccctggtcaacatagcaaaaccctgtctctcctaaaaatacaaaaaaattttacctgggtgtggtggctcatgcctgtaatcccagctactcgggacgctgaggcacgagaattgcttgaacctgggaggcagaggttgcagtgagcagagatcgtgccactgcactccagtctgggtgacacagcaagacttaaaaaaaaaaaaaaaaaaaagacgcctgggttctggtctggcctcctccaccttcagcaagccgcactacctccctcagcctcagtctccccatcttcaaaatgggtctagtaatccctagtcaacagggcagttatgagctaagtcaagggcttggataagtgatccaagcaaggtggtaacaatatgtttgcaaagtccagggcctggagccaagcccaggattcccaccacagcatgatgcagcctccctctgatatctctgacccatgggccaaagtcaccctctgttggatttgtctggcctatacagtgcttttagagatatgttttgaaggccaggcacggtggctcatgcctgtaatcctagcactttgggaagctgagatgggagaattgcttaagaccaggagttcaagaccagcctgtcaacatggtgaaaccccatctctactagaaacacaaaaattagccaggcgtggtggcaagcacctgtaatcccagctactcgggaggctgaggcaggagaaacgcttgacctgggaggcagaggttgcagtgagccaagatcgtgccactgcactccagcctgggcgacagaatgagagtccatctcaaaaaagaaaaaaaaaaaaaaaaaagaaatatagtctgaatctgtggctaaaattttaaaatgagacatcttgcctgaaaactcctgaattatggcttctgttgaaaagatcagcacatctggccacccaggcctatcttcctataaggcaggagtgggcacaggtaagaaaaggttaccctgaatttatgattcctgccaggccccaggaggcaagagatcgcaaacttagcactggctctcgcaaaattcctcccaggagtttgtacaggtcccagcaaaacaccatggaataaaaatcattaacagcgaacatttaaaagtaaaagtatcagagatgggactaaacacttcagtcattgaacattgattgacacagcacttcctacctcatcccagatactgtgctttattaataccaacctctcatttgaaccctatgacataggaactgattatctccattttacagatgaggaaactgaggcacagggtagttatgtgatttgcccagaatcccatagctgctacatggtagaggcagggtccaaatccttacactctgattctagagtctttatgtgttttgacaccaggcagtgctgcaaagtctcagtaaattctcacaatgacctgatcacaactttacaaatgtggaaaccgaggtacagagaggtcaagtcacatgcacgggatcatgctaatagaaactagcagatttggagccgggcgcggtggctcatgcctgtaatcccagcactttgggaggctgaggagagtggatcacctgaggtcaggaattcgagaccagcctggccaatatgttgaaaccctgtctctactaaaaatacaaaaaataacctggcttggtggtgggcatctgcaatctcagctactcgggaggctgaggcaggagaatcgcttgaacctgggaggtggaggttgcagtgagccagaatcatgccactgcctccagtctgggcaaccgagcgagactttgtcgaaagagaaaggaaaaaagaaagaaaggaagaaaaggaagaaaaggaagaaaggaagaaaggaaggaaagaagaaagaaaggaaagaaaggaagaaagaaagaaaggaaagaaagagaaagaaaggaaggaaggaaggaggaaaggaagaaaggaaggaggaaaggaagaaggaaaggaagaaagaaaggaaggaaggaagaaagaaaggaaggaagaaaggaagaaaggaaagaaagaaagaaagaaggaaagaaagaaagaaaa[138 bp omitted]atgtgaaaccctgtctggactaaaaatacaaaaattagcagagcatggtgatgtgcacctgtcttcccaactactcgggaggctgaggtaggataattgcttgaacctgggaggcgggggttgcagtgagccgagatcatgccactgcactccagtctgggcaacagagcgagactttgtctccagaaaaaaaagaatccctaagcctcagtttcctcatctgtaaagtggggctgctgagaaaagtaagtaggtgaaatgcttagggtagtgactgacacatagcgagtcttgctgctgttgtgttaatttcctctgaccccagagcccatgcactgaacttatgcatcctaaaataaggcagtttgggcacaccctgcagaaggaagcctgtgagagggtctcctgtcatagctactctgccacaaccatccccccaaataaggagtcacagcaaggcgcctacctccagaggggtgaagtcatgattgaccaggaacgccagaatggctgtgggaacgaccaggaactccactctgaacgtgtcatggttcccatcgtaagtagctttgaacttgctataaatcaaccagaccgtggtgaaggagcaggctatgtagaccacctgaggagggggatgatgagaaggggcctcaactcacaggcctgtgccccagtaggctcagagcccggagtccaggcccctccctcagacgcaggagtccagacccccaacccctcctccctcagacccaggagtccaagcccccagcccctcctccctcagacccaggagtccaggcccccaacccctcctccctcagatccaggagtccaagcccccagcccctcctccctcagacccaggagtccaggcccccaacccctcctccctcagaccctggagtccaggcccccagcccctcctccctcagacccaggagtccagggccccattccctcctccctcagatccaggagtccaggcccagcccctcctccctcagacccaagagtccaggcccagcccctcctccctcagacccaggagtccaggccccagtcccttcctccctcagacccaaaagtccaggcccccggcccctcctccctcagacccaggagtccagacccccaacccctcctccctcagacccaggagtccaggcctcagtcccttcttccctcagacccaagagtccaggcccccggcccctcctccctcagacccaggagtccaggcccccagcccctcctccctcagacctaggagtctgggacccacacccggctcctctgcctcagtgggggccagagaggtggggtggagcctctaccttcatacacgtgttgtagagtgagatgtagttggtgaagaggtccagatatcgggcagtgaacaccacagcaaacaggacctggctcttccctgaaattcctgtggtccagagacagagaaagagagagagagagagacagagagagagagagagacagacagacagacagacagacagaaggagagaggaagctgggggtgggctgcatgggcaataaactaaggcagggcgcccgggaccagcctggaggcagctctggagtgcagctgtccccggaggcctccccagcccgccccgcctgagcagggccctttcccacggaccacagccagggggcagcccaggcccccgaagctactccagcccgaggctccgtcccagactaggcctcatggctacccctggcccctcagggtcctcccgcagtctggacctgaggtgaggcctagggaggaccttccctgacctcaggccccggatccggtcacctccctcccgttcccttcctggccgccacggtccacgtcaccaactcacagccacctccccgcctgccatggttccctgttcccggtccatgaaccctcgggctgcccagattggggctgggggtggctgaattgggggcctaaagccattcacatgaaactgtatgcacccccgccagtctggggaagggagctgatcccctggagacccagaacctagaagagagatccccagcaagcagtgggggtggaacctgtgcccctagtgcccccaaacccttcctgagtcctgcgacgtcccccaacccccgcccgcaatctctctccttcgccagccctggtgggcctctcaccggcgcacgagcgggacttccagattttgagcagtagcaagatgatggcgaggaggtgggagaggtctcccaggaatcggaagagattcatggctggggaaccctggcagggctgagcgggagggaggcaggctggcgggggggtgccccccgaggctgctggtctgaacgggtagctgggctggggggacggaagagggaccctaggtgcgctccgctccggggaggggactttgggagggggagcaaaggctggagctggcggcggagctggagccgggaagagggaggagagcgagagggggaggagtccgggaggagaggctccgcccccgagggcggggcctggatccccggcgccccctatcgcccacctcctgctttgccgtggcggcgctaaacgcacccccaaagctgccccataggaacttgggagggtcgcagggttcggaaagtgccaaatccagcaccggttcgcccaggcagtctgtgtctctggaagagacgcagtccagtacaccagcctcagcccttgcagggatgtagagactgccctctgagcttgaaaaatcctgcagggacccggaggctcagctgctagcttttgcagctttcaggcactctaactccaatcccccagaagacaagaaagataccccacctacttcctcccctagacccaggactcaaggccccagcccgttcgtcaaacccagaagtctgggtccccagcccctcctccctcagacccaggagtccagacccccagcctctcctccctcagacccagaagtccagacccccagcccctcctccctcagatccaggagtccaggcccagctcctcctcgctcagacccaggagtccaggcccccagcctcctccctcagacccaggagtccaggcccccagcctcctccctcagacccaggactccaggcccccagaccctcctcccccagatccaggagtccaggcccccagcccttcctccctcagacccaggagtccagacccccagcacctcctccctcagacccaggagtccagatccccagcccctcctccctcagacccaggggtccagggccccagcccctcctccctcagacccaggggtccagggccccagcccctcctccctcagacccaggggtccagggccccagcccctcctccctcagacccaggagttcagggccccagcccttttccctcctaggacgctgttccttggaacttagggtcccacccccaccatcttatggatcaaacatcctaaccttaagaatctagatctacagtttctccctttacgacccacagatttaggccctgattctcttctttttcaggaatgtgcacctcaccctgttctcccagaccttgaggatgaaggaaacaggagcctcacccaggaggctcaaggccaaaactctgacccaaactacctcaggagcccctggccctggcttcccccctgctccagagtttctgccctgcccacacacacacaccctcttccaccctcagaggccccggtgtcctgccccacgctctaccccagagccccacgggtggctttataaaagtgccgggcccagccctctagcaggaggggaatgctgggcatctgggtgtgggacccccggggaacagcctgtggtctggactcctgcatctatgaggggacagacgtggcttcccttccggatgatggggtacccacagatgatggaggccagggtccctcaataaaagaaggggtgcaggcgtgttgatttcttcagagggctggaaggacggggtgcccaagggtgacatccacgagtcttgggtccctgagggtggcttgtacgggggagagtcgggatgactgagtccttaaaagagactccgacttggaggcggtccccaaattcctgggtcccagtagagaaggggactcctgggtctgagggaggaggggctggggggtgggactcctgggaccagggtcgagacctggttttcaggcctggccttctggggcaataaaagccacagcttgggtcttagtgtggcgaacactgaagtcagggaaaggcctcctgtttccagagcctcaaggcagggcgggggcagagggcagcaacccccagccctggagtctagctctgaagctggtgtctccataccgggttctgagtccctgcctgcctgtccccagcctgacttcttcctccctttttattttcagcccctcactcccttgtcccaggaggaaggcagaggctggtagctaggggtggggggcggccccctccccaagcctggcaggagaaggggtccccagggaggccaggagggggggctgtgggtctcccggcagtggcagacggggactgaatgttaatcgcatcccgagtgagtgtgtgtgtgcgagaacacagcgagtgtgtgagtccctcccgctccagctcctccaagccgcggccgccgccgccaccctcgcccgcagcctcccgcagcctccctcggccaccggtgcctgctgggggtgttgcctgggtaggtcggcccggcccccaggggtctctcgagcgtctgccatctgcccggtgaggatctgtgtgtccgggtgtctggggctggctggtggagggggggtgtgtctgtaagcgctgcggcggcggagggagggaggggtctgtctgtctgtaccgaccctgagctgcctgcctgggtgtcgtggggctcccgctccttccccccggcccccccaaacccagatggatggtgtgtacctgggttctgtgcctcctgcctgcgtccggccaggcgtctgggcgtccccggctgcctgtgtcctcctgtctgtccaaacagcccctatcagcagtggcagcctggcccccattagaccccccactctgtgtgtgtgtgtctgtgtgtgtgtccctcctcaagctctgggggtgttgagggggaatcccagggaagtgagatcgtgcgtgtgtgcgtgagtgtatgtgtgtttctgcctgtgtttgagagtgggggagtcaagggggggtctagaggtggccaagcgaggaaggggcaagcagttccccaagcaggcaatctcccgctcctcacacgcacacaccagccactagcttcagaggtgacccagacagacagatagacacagacgctggaagggggggtgggggggctgagggcacaaagcgggggtgcgagtgagccagggagaggcgggactggacacatggaaaggggggaggagccggggctgaagcggcagaggggggcaccccgggtgggcggaggggggatccccacggggtcggggcggcaagaggacaccccgacagcctctgcaatgtccggggcccaacttccagagcaacatgtgtagccacgtcctcgcctagtccaggtggccgcaaccttgggggagagacagggcaggacaggaccaaggaagaggaaggagagacggagccagggacagacaggaggtccgggctgccgctgctgccgccaccaccactgccgccgccccggggcctgccccccgacatcggctctctgagccctcctcggaatcttggggtcgctggacgccgggttccggtcctggcccccccgccatccccccaacagaacagggtcatgaaaaggtaaggcggggacaggggatgcagggatggtggtgggaatgtggacccccaaatctaggacagaggaagttggcaagaagcctcgtggagggagggggtttgaacggtgggcaggggtcttgacccccacctagctcccctgtccctcagggactctcctccaccctctctctctccctctctgagcccctttttcctgagtccctacacctcagacctttcacgcccccatttctctgacacttggctccctctccccatccccacatacctgatgccccatatccctgtgcctccatctctctatctcaccttctccctgtacccccctccctgcatcagtccccccatcgcgagccggtcctctccctctctcctctcgctctcccctcccatgtcagagctatgagtctgctattaatacccccgccaaggaccttgagggcatccaggcccccagcacccctcgccccaagctcccaccccttcctcaaggttctggaacacccttccagcctcttccaagcatcaggattcgggtggggagagaccgatgttgtgtgtgtgtgttgggaggtgaggggggaggaaacgggatgccgtctgcagcacaactcgaggttgtggggggagctgttgatcgaagtggccgctcctctcttctctgttggatgctgtggggggcaatgaagacagggacaccctaggaatttctggcaccctcctcctcctccccgcttggggacaggctgtgctatgtacaggatctaagtggggtgactagggaggccagagctcggtgggggggcacccaggatgttgggaaggatagggtttgaaaccaaaaggggatccttaagggaggacaggagccggaacccggactcctgggtccttgggggaagaggggagctggggacctggactcttggttcctgcagggagaggaggctgggcactggagttccagagtcttggggcaggaggggcctggcctcctgggtcctgggaaagaacaggaccgaatgcccagactcccaaggcctgggggaggaaggggctgccagaaggactcctgggtctttacgggaggaggtaggggatagcgcttccgtctgaggaaggcaggctgggagctcagtctcctgagtccctgacagggcaggagatgagtgttggggactttagccctatgcagatggaagtggaaacggaggctcatgaggaggtagagatggaggcggggggagcggggggttgtccagaggctggactctgtgatccctgagggcgtgggttctgggggttgggccttcagagtcctggaggactggggatgcccctcctcaggccctggagtgggggaggctgctctccctaatccctgtggttaggaactgagcatgcagcccccgtgagaagggtggggccgggggctgccctcctgggcctcagtagggagtgggacgcggggtccctaagagcagaagccaggtaggggtgggtctgggagaggcagaggaggggctggagggtgagcagccactgggaatggaggggagcgtgagtgttaaccccgcgggggccaggccacagctgtgggttattttggggcggagtgggggggttattctgagcgctgattgagccagctgcttggggaagggcaatggaaaggaggagcgaagagaagccaggatcggggagggatgggcatactaggagcccccaaccccttccctggggagacaggggcccgagatctctgggaaggtgaggtggtgggcagaggggacgggctgtggcctcgaggcaggggaggggtggtggacctttcccccgccctggctgtctgtggggtggacgaggcctgcgctaccatggcaaccagacaggagcatgacagccaggagagaacccttccttgtctggaccctcaccccttctggaagcccctagtgcggactccagtccttctctgggaaccaggagtccagactcccagtgccctcctccctcagtcccaggcaggacccaggagcctggctcccagcccaaccaccccaggcggctagtattcaacagggggcacaggaagagaggctgtatttcctctaatttaccaaattgctctgggctgggtgccagggacccccacacccaccccacccagctctccacagctgtgccccccaaccccacatcccagatggggccatgactcccttgctttgagaatgaggggatggggacaggactaaggggacaaaatgggttaggggttgtggtcagggtgaggagtaaggtcatgtggggattttctctccttggggtgccccactaatttctctctttctctccccacacacctgaccccttttccctctcattttttctctcccttttcctcccttttatttctgctccctcctgccactcgccttccccgccttactttcatgtctgtactgggcacctccctggtgggggtcccgatcttggccttgcttcgctatttctgtcctcctgttttcgctccgctctgcctgcctccctcaatctcaattgtttccccatcctttatgtgcgcgtgtctcttggtggccttggggtctctgtctccctcttcctgccttgctgtcttcttctctgtccaactttcttgcctcgcttatctctcccgccttcctgcatctcttcccgcctctatcatcctctccctgggcctccctcattcctgtttctgtcactccgtcctctctctctccgtcttctccccgtctctgctgcttccgtctctctccttcttcctgccgctctttccctccccgtctccctgggcctctctctgctcctatcttgatcccatctctgtgggtgtccccatccccaccttgtctatcttcctctctctcccctcttacctctgtatcttcccctgaccccattatccaccctcgtctttgcgtctcccccaatcccatactccacttcttcctatctctgtctcgccctatctctgcgtctctccctgtttcacctcttcctctggtgtttcttccccacctctcccttccacctccctctgctgtgtctgtctctccctctgtctctgcctgtctctcctccatctctctctctccgtctccccctctctctcccctccatctctctctacctctgcccgtctctccctctgtctctcctccatttctctctccctctgtctctctcccttccatctctctcgtcctccgttcctgtctctccctctgttccatcaccccgaccgctccctgtcctccccatctcggcgcctgtccctcgctgcatctcctcctctgtgcgtctctttatctcgtctccctgtccctgcgtctcccgtctgtgcctccctctcctccccgtctctcccggcccgggcgctcagaggccgcccggcggggcccgcaggcgatgcgcggcgccggtggcccccgcggccctcggggccccgctaagatgctgctgctgctggcgctggcctgcgccagcccgttcccggaggaggcgccggggccgggcggggccggtgggcccggcggcggcctcggcggggcgcggccgctcaacgtggcgctcgtgttctcggggcccgcgtacgcggccgaggcggcacgcctgggcccggccgtggcggcggcggtgcgcagcccgggcctagacgtgcggcccgtggcgctggtgctcaacggctcggacccgcgcagcctcgtgctgcagctctgcgacctgctgtcggggttgcgcgtgcacggcgtggtcttcgaagacgactcgcgcgcgcccgccgtcgcgcccatcctcgacttcctgtcggcgcagacctcgctgcccatcgtggccgtgcacggcggcgccgcgctcgtgctcacgcccaaggtgcgcgcgaccggggcggggcggggccacaggaggggcggggacagccgctgaggggcgggactgggacagccagcgggggcggggcctagagggggcggggactgtcctgtgggtccgagtctgggacaaggtgggcccagatggtaggcagggcttagggctagattagaggcggggctgacttggagggggctggtctatagggtaagctgggcctttagggtcagaaagaggccagtcctcgatgatcagagtatagggaggacgtgggcccattcattgcaggtaagggtctgtagtaaaggcgagtcgagggaagggttaggggctgggaacgaaaagggactagccccaaatggcaaaatctgagggaggggtgggacctaggatcagcacaggaagaagtcagttgaaaaggaatgggcctgggcgcggtggctcacgcctgtaatcccagcgctttggaaagccgaggccggcggatcacttgaggtcacaggagtttgagaccagcctggccaacatggtgaaaccccgtctctactaaatatacaaaaattagccgggcgttgtggcgggcgcctgtaatcccaactactcgggagggtgaggcaagagaattgcttgaatccgggaggcggaggctgcggtgagccgagatcgtgccactgcactccagcctgggcgacacagtgagactctgtccaaaagaaaaagaaaaggaatggagttcagaaagaaaggggcgaagtctagtggagaggtggcagctaggaagtatcagaggtatcaggtaccaaggacagagtttggggaggcgttcggccggtagagcatagggtctagaagtcagccagggatggaggagccatcttctaagtggaagtcggaaaagaggaagagtcattagagagaggaggacgggcaaggggtagaaccaggaagcaaggaattgagatttggtgcgaggccagtcagggaaggagtgagtcagaaaagggggcggggctagccagttgggggcggggccagcgaggggcggggcctaagcactctaataaaggggtgggtctagggaggaagccggtcctgagagtagggtttgagaaggggcataccccgctgtgaggtgtggaaagcgagagtccagaggatgggcaggaggatgaaggcttatggtggaggccgacccagccaatgacagatcaaagccaggagcctgctgggaagggatggtagaggctggagctggccagagcctggagaaaggcctgactcccaagggcacagaaggggccagttgtagcggacctctggtagagaaggagagaattggaccaagcctgctctgtggattgagaatgggtcagctaggaggtggggcctgagaaggggcggggcctctccagaggtggggccagcgcaacccagaggtggagcttcattcaatctgcccattccctgctgtgcgggcctgtggctgtgtgactgcatcactgttgtatgcagaggctcgtagtcctctcctgtccagagcattctgggaaggacctctgtccaactttcttgttctccttggcatggtacttttcagagatttgtaggtagatgccctgggaggcgaacttatttcttaactgccacttccaaggcatactcaaaagacgtgatccctcgtgccttcattgctgctgagaagtgtggtcctctctgtttcattgtccgctgggcactgcggtcggctcagtgtacgcccatagcattctgggaaatgtagtccccgtgctgcccctggatggaagaaagaatgatcttcacagctccatctgtgccccactgaatgctgggaatgtggtcccctcagcacacctccacctgctgaaggaagaggttc[135 bp omitted]accccatctctgctgaaaatatgaaaattagccgggcatggtggcgcatgcctgtaatcccagctactcaggaggctgaggcaggagtaatcgcttgaacctgggaggcggaggttgcagtgagccgagattgcagtgagccgagatcttgccactgcactccagcctgggggacagagtgagactgttctcaaaaaaaaaaaaaaaacaataaacaaaaagaactcattccctcaggacaactgcagtatcccctgtgcgcctagggagaaagcccacttgctgttctcattgcattacaggaagatttattgagagctgattctgtgccagggctgttttaattcctagggaatacagttctagagggggggggaaaaaaagagagggagacaaggtccctgccttatagagcttgcattttaatggtgagacagacaaaaccagtaacagtaaaatccggctgtcctggaggaaatcaacacaggatgttgtaatgactgaggatggagtttcaatagatggcagtcaggggaggcctccctgaggcggtgacacctgagctggaggtgtcaggtggaggtctggcatggaggaggtagggaaaagtgtccccaggagaggcaacaacaaaggacaaagcccttgaagcaggaaggagcttgatgtatttgaggaagagcaagaagggagtgtggctggagcccactgggggattggggtggcaggagatgaggtcagagaagcaacgggggccagttcacgcagggccttggggccacggtgaggactttggctttgattctgaggtagaatcactggaaggttttcaattgagaagggatgtgatccaattaatattttgaaacaatcactctggctgctgtttggagaatagactggaagatgcaagattgaaaacaaagataggctgggcgcagtggctcatgcctggaatcccaccactttgggaggccaaggcgggtggatcacttgaggtgaggagtttgataccagcctggccaacatggtgaaacctccctctactaaaaatacaaaaatgagcttggcatggtggtgcatgcatgtaatcccagctacttgggaggctgaggcaggagaattgcttgaactcaggaggtggaggttgcagtgaggcgagatctcgccactgcattccagcctggacaacagagcgaaacttgaaagaaagagagaaagagaaggaaagaaagaaagaaagaaagaaagaaagaaagaaagaaagaaagaaagaaagagagaaaagaaaacagagatgggtgggaaagttgtagatagctgggcaagaaagggtgacaatgagagttgtgacagtgatggcagtgaggagtggacaactggagctatctttgaacgtagagctaagaagacttggagatggctgaatgtgtgagggaaagaaagggaaaggatgatttaggtttggggcctgagcatcagggtgaatgagagagagaggaaaaaaaaggcagct[212 bp omitted]gaggcaggagaatggcgtgaacccgggaagcggagctttcagtgagccgagattgcgccactgcggtccgcagtccggcctgggcgacagagcaagactccgtctcaaaaaaaaaaaaaaaaaaaaaaaagattctttactcctttacgagagagagagagagagagagagagagagagagagagagaatagggaacagtcttgagataggggaaagatcgagcaatctgtttttgacatgctaattttgagacaccttggaaatccaagaggagatattgaataaaaaggaggataggggccaggcatggtggctcacacctgtaatcccagcactttgggaagccgaggcaggcagatcacttgagttcagaagttcgagaccagcttggccaacatggtgaaaccctgtctctactaaaaatacaaaaattagctgggtgtggtggcatgtgcctgtaatcccagctactcagaaggctgaggcaggagaattgcttgaacccaggaggcagaggt[137 bp omitted]acaggagccattaacatatccagcactgttcaataaaactttcagcaaagatgaagctgttctatagctgctctgtccgatttgaaagccacaagccacatgtggctgttgagtacttgacaagtggttagtgcacccagaaaactaagttttaaattctatttaacatttttttcctctggtccttgattcaggataaattttatttaattttaatttgaatagttatgagtggctaacagccaccctattggatagcatgggagacagtatttaaactcatgggcctggttgagatcaccagggagagaggaatagagaagagaacagtaaggcactcctagtgtttagaatttagaattctggctgaggaagaagggccagcaaaggaggcagaggaagaggtgacagagaggtaggaggaaaaccaaagaagggaaaggacactctgcaaagcttcttccagtagggaaataccatcagcaccctcattgcatgctgggagatgtagtctcctcactgccttcagggaaccagtccctctcagtggctgctgggggctgtagttcccttaccggatgctggttgtattaatgacagtgatgttagctgctggaacggatgaacccccaaatctcagtggatcacccaacaggaggttgtttctcattcatataaaatccaggccaggcacagtggctcacgcctgtaattccagcactttgggaggccaaagcgggtggatcatctgaggtcaggagttcaagaccagcctggccaacatggagaaaacccgtctctaccagaaatacaaaaattagttgggcgtggtggcgcacgcctatagtcccagctactcgggaggctgaggcaggagaactgcttgaacccgggaggcggatgttgcagtgagccgagattgtgccattgcactccagtctgggcaacaagagtgaaattccatctcaaaaaaaaaaaaaaaaaatccaaacaggtgttcctgattggaggtggctttcctccgtatggtgactcggggtttcaggctctcaccctcttgtagctctgtaatccccttcagaggactaagcttcaagagtaaggttttattaggctgggcacggcaggagaatcacttgaacccaggaggcggaggttgcagtgagccaagatcatgccgctgctcaccggcctgggcgacagagcaagattctgtctcaaaaaaacaaaaaacaaaaaaacaaaacaaaaaactaaggttttatggatgagtctagaataactcatcacgtggctaaacctaatccagatctagccctgtgccccaggaggaaaaggagatgggtttagtgaacctgtcgagtcagtctgccatattgggagctgtggtccccttattcattgctgagaaataaggtccccacatcggcaggcctgacatcctcctccctccctggcaggagaagggctccaccttcctgcagctgggctcttccaccgagcaacagcttcaggtcatctttgaggtgctggaggagtatgactggacgtcctttgtagccgtgaccactcgtgcccctggccaccgggccttcctgtcctacattgaggtgctgactgacggtagtctggtgggctgggagcaccgcggagcgctgacgctggaccctggggcgggcgaggccgtgctcagtgcccagctccgcagtgtcagcgcgcagatccgcctgctcttctgcgcccgagaggaggccgagcccgtgttccgcgcagctgaggaggctggcctcactggatctggctacgtctggttcatggtggggccccagctggctggaggcgggggctctggggcccctggtgagccccctcttctgccaggaggcgcccccctgcctgccgggctgtttgcagtgcgctcggctggctggcgggatgacctggctcggcgagtggcagctggcgtggccgtagtggccagaggtgcccaggccctgctgcgtgattatggtttccttcctgagctcggccacgactgtcgcgcccagaaccgcacccaccgcggcgagagtctgcataggtgagtggggctggaatgggaggggtgtgggagggctcccagagcctaactacctcagtattcactgaatgagtggctcaaatgggccacatctgctctttgagcctcagttttcttttctgtaaagtgggtgcaattgggtctcttttctgaggttaaatcaagtaatttggaaaaagcacctgagataaagtgagtgtattactatatttcatgactctaagatgcataatgtttcacattttaatgtctttgaaaacgagatgtgtcttataattgatgacttatcatggcttaattggcagcacttttgtctttctttgtggtacatcttataattgagagcattttagatttagtctaaatacctagactataaactgagcttcagtagcaaaaaagacccaacaatccagtggcccagatgaggtcgaagtttgttcctctctcacgtaacaaccctgataaggagactgctgttccatgtgatcattcagggacccaggattctcccacactgttactctggcatctctgcatggtcgaagtgggtcgtggggatgtctgaattgtagctcatgagaaggggaaaagagaggaagtggacagcaagcactttccttttgagtaagtgaggcagaaaggacacgcctcataccttactgttgagaacgtagtcatatggtcagggctggcttactggttgttgacagtggtgtccattctgattggttggacgtctattggaattagctagacgtctattctgattagctagacgcctattctgattgactagacgtccattccgataggctagacgtccattcctggctagacgtccattctgattggctagtgcctgtgcagcgccgattgctacatattttgaatattactcctgcacatggcctggccaactgcaaggaagagtgggaaatgtcagtcctagctggacaggtgtgtgcccaacttacgcactattattttagaagaggcgaacagagtttgttggaaaatagcatctccacggtaggaagctctgggagtggaaaaattggtaagtttggtgacagaacagtgaaaagagagacctttaatcctgaacgaggatggggtgaatttgggaagagatgatggttggggaagaagacctaagagagggtaattgagaactggtgacttgggaatcaggatccccgaaaaagaggatgagaaaagcatcccttcttcataaatacttactgagcacccgctaggaactagggctcatgctgggcgctgggaacatagatgaataagaccatgaacttattcttcaaagaacgcagggtcctgtaagagtggcagacagggacagggataatggcaacgcagcatgatgcttgcagtaatggaggtcatgcgggcatggcgggggcacggggaggagcactggctaagccaggagattttcggatgcatgaagcagagtctcactggagtttccttagggaaaagggggtttattggaaaaataaacacacagaggaattaaagccaggaattgaggctaagcctggggccagctactctttcagctctttctggttctttctttttttctttttctttctttctttttcctttttctttttttttttgagacggagtctcactctgtcgcccagctggagtgcgatggcgtgatctgggctcactgcaacctccacctcctgagttcaagcgattctcctgcctcagcctcctgagtagctggggttacaggcacgtgccaccatgcccggctaattttttttgtatttttagtagagatgccatgttggtcaggccagtctcgaactcctaacctcaaatgaactgcccacctcggcctcccaaagtgctgggattccagccgtgagccaccgagcccagctggttctgtctttcttattctatgctttctccctccctccctctgtccatctccttcctctctctctctctttctctttgtttctcaggcttgcctctcccagacgctgttcagttctttacccagaatttcttctccctcataacttcagctcttgctggtcacaactcatccctccagatctcatagcaaaatgtcatcccaagagaggaaatgtattagcctcagtctgccttccaaaccaggttgcacaagtcacaagtcagcctgtggagtcaggaaggtttctaggagaaggtatctgagctgtgacctgagggatgaattgctcattgattcatttattgattgaaacgccctttattgaaagtctgctatgtgccaagcattgctttaggcacagggtgtatatagtgttaaataaggtccctgctctctcagagcttacaatctgataaaagagaaatgcaatgagcaaataagtaaagaaaaggaaatatcaagcaggcaataacttctgctatgaaaatcaaactggggaatgtgataagaaatgcatagggggctatgctaggtggggtggtcaggaaaggcctttctgaataggtgaaatttggaggttaaaaaacatggataggccgggctgtggctcatgcctgtaatctcagcatttcgggaggctgaggcaggaggatcgctagaggccaggagttccaggccagcctgggtaacatagtgagaactccatctct[135 bp omitted]cctgtctctactaaaaatacaaaaaattagccaggcgtggtggcgggcgcctgtagtcccagctactcgggaggctgaggcaggagaatggcatgaacccgggaggcggagcttgcagtgagccgagatcgagccactgcactccagcctgggtgacagagtgagactccatctcaaaaaaaaaaaaaaaaaaatctgggcgtggtagtgtgtgcctgtagtcctagctacttgggaggctgacatgggaggatcacttgagccttggagatcgaggctgtaatgaactgtgatctcttcactgcagtccagcctgtgcaacaaagtgagaccctgtctctaaaataatttaaaaaattaaaatttaagaaataggtaggcaaggtgtggtggctcacacctgtaatctcagggctttgggaggctgaggtgggcggatcacttgaggtcaggagttcaagaccagcctggccaacacagggaaacaccatctctactaaaaactacaaaacttagccgggcgtggtgacaggcacctgtaatcctagctgcttgggaggctgaggcaggagaatcacttgaacctgggaggtgaaggttgcagtgagccgagaccataccactgcactccagcctcagtgacagagcaagactctgtcttaaaaaaaaaaaaaaagagagaaagaaagaaatggataaagcgaaggagccaagtattggaagatctcagtgaagggagagggaacagcaggtgcaaaggctctggggctggaactgccttgtcttagtctgttttgtgttgctatgacagaatatcataggctgggtaattataatgaatggaaatttgttggctcttggttctggaggctgggaagtccaacatcaagatgtcaccgtctgatgagggtcttctttcagcatcattacatgagggaaggcatcacatggtagaagggcaaagagaggagtgagggaagatcaagcaaacccactcctgcaaccacagcattagtccatttgtgagggtactggagccccatgacctaaatgcttcttaaagtttccacctcctaattcccaataccatcacaatggcaatggcaattaaatttcttttttttttttttttttttttgagatgaagtctcactctgttgcccaggcgggagtgcagtgatgtgatcttggctcattgcaacctccacctcctggattcaagcgattctcctgcctcagcctccgagtagctgggaccacaggtgcctgccaccacacctggctaatttttgtatttttgtagagatggggtttcactatgttggccaggctgctctcaaactcctgacctcaggtgatccacccacctcagcctcccaaagtgttgggattacgggcgtgagccactgcacctggccgtaaatttcaatatgagttttggagcggacagacatccaaatcatagcttgcctgttcggaagcctgtttgggagcctgcactgctggtgtggctagaacatagtgggcaaggggaaggaaggtatgagtagcggatggagagggttgcagggcccagcttgtgaagggcctttaggccagggggcaggggtttggacatgattcttttttttcttttttttgagatacagtctcgctctgttgccctggctggagtgcagtggcacaatcttggttcagtgcaacctcaacctccctcccgggtttaagtgattgtcctgcctcagc[214 bp omitted]ggaaatagtattccagtcaggggaaacgagcatatgcaaaaacccagaggggagagaaacttgggcagatggtgggaccacaatagttc[146 bp omitted]cccgtctctactaaaaatacacaaattagctggacatggtggtgcacgcctgtaatcccagctactcgggaggctgaggcaggagaaccgcttgaacccaggagacggaggttgcagtgagctgagatcgtgccactgcactccagcctgggcaacagagtgagactctgactcaaaaaaaaaaaaaaaaaaaaaaaagcagtcggagtgtgggtggcaccaggcctttgccttcaatgcaggttgagaggcctggatctgttccacagcactggtgagccaggggtgggttatgagcaggagacgggtggcgtgagttttgggtatagaaagacgcctctgggacctggtggggaacagactggagtagagagattggaggctggaggccaggcaggaggctgggatgagggcctaggagggctgtggggaggcacagaagaagacagggcagagagagccccaggccaggaagaaggagacttggggaccgataggctgggtagcgggagggaggaaggcggctaagagtctagtccagtgactgggtggatgacatgagagacagtcagagtacccagggtgatgttgcatagtgaagatattgaggagtccagggacacccccggccatccccagccctgggcacttctaaccagaggaagagacatttgagctcagtctttaagacacatggagttggtcaaggctgggtacagcggctcgtgccagtaatcccagcactttgggaggtcaaagcaagtagatcatctgagcttgggacatggcgaaacctcgtctccaccaaaaatacaaaaattagttgggcatggcggtgcacatttaaagtcccagcagcttcacaggaggctgaggtggaaggatcacttgagcctgtgaggcagaggttgcagtgagccaagatcacgccattgcactgcaatctgggtgacagagtgagaccccgtctcaaaataataataataataataataataataataataataataataggccggcagtggtggctcacgcctgtaatcccagaactttgggaggccgaggtgggcagatcacaaggtgaggagttcaagaccagcctgaccaacatggtgaaaccctgtctctactaaaaatacaaaattaggcaggcgcggtggtgcttgcctgtaatcccagctactcaggaggctgaggcaggagaatcgcttggacctgggaggcggaggttccagcgagctgagattgcaccattgcactccagcctaggtgacagagcaagactccatctcaataataaataaataaataaataagaagaatagttggtcaggataaggggtggtataaggtttttcaggcagagagaacagcatctgcaaagtcctagagataagaaatcacttgacatgtttgggagacaccttgaagccagtgttgatagagaaaaaaaaaaagaattttggggtgaaaagagtttgaagtttgagggtgggaactctcagagatgcggcttcagaggaaggcaaagccagaacaaaaacagactctaggggcctggcacagtgattcacacctgtaatcccactatgttgggaggttgaggtgggaggatcacttgaactcaggagttcaagaccagcctgggaaaagtagtgagaccctatctctacttaaaaaaaaaaagaggctgggcgtggtggctcatgcctgtaatcccagcactttggaaggccgaggcaggcggatcacaaggtcaggagatcaagaccatcctggctaacacggtgaaaccccgtctctactaaaaaaaatacaaaaaattagctgggtgtggtggcaggtgcctgtagtcccagttacttgtgaggctgaggcaggagaat[141 bp omitted]gaagaaagagaaagaaaagaaagaaagaaagagaaagaaaagaaagaaagaaagaaagaaagaaagaaagaaagaaagaaagaaagaaagaaagaaagagagagaaagaaagaggcgggccaggccaggcgcggtggctcacgcttgtaatcccagccctttgggaggctgaggcgggcggatcacctgaggtcatgagttcgagaccaccctggtcaacatggtgaaaccctgtctctactaaaaatacaaaaaattagccgggcatggtcgtgggcgcctgtaatcccagctactcgggaggctgaggcaggagaattgcttgaacccgggaggcggaggttgcagtgagctgagaccacaccattgcactccagcctgggcaacaagagcaaaactctgtctcaagaaacaaaaacaaaaacaaacaaaaaaccacacattaaaaaaaaaaaaaaaagaaagaggagggcatggtggctcatgcctgtaatcccaacactttgggaggctgaggcaggtggatcactgaggctgaggtcaggagttctagaccagtctggccaacatggtgaaaccccatctctactaaaaatacaaaaattagctggacatggtggtgaacacctgcaatcccagctactcaggaggctgaggcaggagaattgcttgaacccgggaggcggaggttgcagtgagccgagaccataccattgcactccagcctgggcaacaagagcaagactctgtctcaaaaaacaaaaacaaaaacaaacaaaaaaaccacacattaaaaaaaaaaaaaaagaaagagggcatggtggctcatgcctgtaatcccaacactttgggaggctgaggcaggtggatcactgaggctgaggtcaggagttctagaccagtctggccaacatggtgaaaccccatctctactaaaaatacaaaaattagctggacatggtggtgaacacctgcaatcccagctactcaggaggctgaggcaggaggattgcttgaaccaggaggcggaggttgcagtgagcgaagatcatgccactgcactccagcctgggtgacagagcaagactctgtctcaaaaaacaaaacaaaaacaaaaacaaacaaaatattagccaagcatggtggtgcatgtctataatcccagctacttgggaggctgaggcaggagaatcacttgaacccaggaagtggaggt[133 bp omitted]gaaagaaaaggggactctagggcctcaacaccaagctgaaagagagtctggaaccttatcctggggggcactgggcagccaaggggagggtgctgagcagggaaggggtatattcgtgtttttgagaccttggaggtaaaagaagagagattccagctgggggctggggctggtctgcagaaaggggactttctctgccttccgctgccaaggtccagcccaggccccagcatgtcccctttccctcctcctgggcaggtacttcatgaacatcacgtgggataaccgggattactccttcaatgaggacggcttcctagtgaacccctccctggtggtcatctccctcaccagagacaggacgtgggaggtggtgagtcgtagccccagacctcaggcatggcagagggtgtggactcctgcatcctggcagagggggggcttgaggtcgtggactaagagggaggaggggacaaggagcctggactcctgggtcctgggatctgaaggtgggaggggctcctgggtcttggaagaagctgctgcccacacacctaggtctgagggaagaggatcatggaggccaggatacaccgggaagtcttcccaggaagcctgactctctttccctttggccaaggtgggcagctgggagcagcagacgctccgcctcaagtacccgctgtggtcccgctatggtcgcttcctgcagccagtggacgacacgcagcacctcacggtggccacgctggaggaaaggccgtttgtcatcgtggagcctgcagaccctatcagcggcacctgcatccgagactccgtcccctgccggagccagctcaaccgaacccacaggtgacagctcgggatccaggagttccggctccaaaacccgcctcccgtgaagcccagtagtctgggcccccagccccctcctcccttgggacccaggacccacaaagccctccagcttggtgaccttaggcaaacctcagaattctttgagcctgagtttcccctgaaagcgctaaccatagttttagctgccgcctatcccttcctccatatcctctcttcatgagagagtctaaggagggggtccccaaactccccaagcctggtcactgcccgcagccctccaccggatgccccccgcccggaaaagcgctgctgcaagggtttctgcatcgacattctgaagcggctggcgcataccatcggcttcagctacgacctctacctggtcaccaatggcaagcacggaaagaagatcgatggcgtctggaacggcatgatcggggaggtgagggggcggacgg[134 bp omitted]caaaacggtgaaaccccgtctctactaaaatgcaaaaaattagccgtgcgtggtggcgggcgcctgtaatcccagctactcgggaggctgaggcaggagaattgcttgaacccgggaggcggaggttgcagtaagcggagatcgcgccactgcactccagcctgggcacagagtgagactcagtctcaaaaaataataataaaaaaaaagaggtcggcaccctggggcaggggcgcggccaaattgaggaaacacctgattggggcctggggcggggtcgcgggagggacatgccttggaacagggggcggggtcaggaggtgtcaggggcggggtttggaggagggactttggagcagaggaggcggggctaggagggtgggactcctaggggaagggggcagggctgggaggagggactttggggcagtggaggcggggctaggagggtgggactcctaggggaagggggcggggctgggaggagggactttggtacagaggaggaggggccaggagggtgagaatctaggggaagagggtggggctgggaagatctggaccaaggccttgaggtcttgctgggagcagccgggtaggacgcgggctaccaattcccaatcttgttccccatttctcacctccgcccttccctgccccactcttcgtccccctcctcacccacctcgcaatccctcttggccccttccctcaccctgtcactggtctgctcccggggcccgtctctgctcgccgtccgtgtcagtctgtccgcttgagccgggttcccccgcccactcctcatcgcccccaccccaggtgttctaccagcgcgcagacatggccatcggctccctcaccatcaacgaggagcgctccgagatcgtggacttctccgtccccttcgtggagaccggcatcagcgtcatggtggcgcgcagcaatggcacggtgtccccctcggccttcctcggtaatctggggccctgggacagggagctagccctaggcaaagtagccgtccccaaccgtgtgggccctgggatcagaaaacctgggttcccggtatcatcggtacttgaacccgctgtgcaacttcggtgaagtgacatcatttctgaacctcagtttcctaatctacaagatggaagaaataatttccctacccagaagacatttcatcaagaggctaaagaagcttgagctcaggagccttctcttgcactgcagcttccaagccctgcacctggttttgtattcataaggttgaattattttttctcaaagagagccctccaaattgtgcaagcttcaggccccacaaaacccaagtgttttcctgtactaggtatgagatgaagagaacaaattagcatggtaccaataccttgtaagcacttaagtcaccatcagtgtttactgagcatctactatgtgccaggtggtgggctccacactgggaacacagtggcaaatgaggaagacacaaatccctgtccagtaggatctctcagccttgtgaaggaggcagaagataagcttctacttctctctctctctctctttttttttttttcagacagagtctcactctgtcgcccaggctggaatgcagtggcaccatctcggctcactgcaacctcaacctgcctctcaggtttaagcgattctcctgcctc[134 bp omitted]cagcctcccaaaatgctggaattacaggcgtgagccactgcacccggacaagggttttaactacagaagatggtgtggggatatataatcagatttaagtttttaaaatatccagctctgtgtaatcccagctactccggaggctgaggtgtaaggatggcttgaacccaggaggcagaggttgcagtgagccaagatggcaccaccgcactccagcctggatgacagagccagaccctatctctaaaaaagaacaaagaaaaaaatcccactctgtggaagcaagtggctggtggggatgctactgcaaggtttatgccagagacagagtgggggtgtgcaataggaaggtgacagcagacagatgcagggtgtggttagagagctgcccaccagatgggctggtggctttgagatggattgggtagagggaccattgctgagctggagaagcgtacatcggccaagggcaacagtgcttgtcagttcccacttgctctctgaagtgtgagcaaagctcctgggagaggggaggggctggaagaagagccatcccttcctttgtgttttgttttctgtttatttcgcccagtggtgtctcctgtggcctcccctttgcaccaaggtctctgcagggcacactgagaagcaccacgtggggcccctgcttgcaggcagcacactgcagaggagtgacaaggtcctatttatgccccaccaagttgcccagcagaggtgacaggcgtgtccccagctgccgcagtgacagtccagggtgctgaccttgctgtgacgggggcagtcctgacagctcacacttggccctggaaagttgaatcacctggtcctaatctcaatgaaatggtgatttgggtttattgttggtgagctcccaggggctaaacacagttatcgaatgtgaggaggggacacatgaatgggaggttgtctaatggacagggcagggtgttaactctagcagggacacctaggagacaaggaagagagggtgtcgctgattcaggcacctgcgagttcttttttttttttttttttgagacagagtcttgctctgtcacccaggctggagtgcagtggcacgatctcagctcactgcaacctccacctcctgggttcaagcaattctcctgcctcagcctactgagtagttgggactacaggcgcccaccacgacacccagctaattttgtatttttagtagagatggggtttcaccatgttggccaggctggtcttgaactcctgaccttaggtgatcctcccacctcggcctcccaaagtactgggattacaggcgtgaaccaccacacccagccacctgtgagttttgagtaaagcatgggtgcttgagagagtgatcaggacagaaaggagagtgtgacaaggctgagtggcagggactttgtcctgggggtgctagggagcctggggagggctgtaagcaggggaggggccaggtcctctctgtgctgtgtgggggataggctgtaggggacagacaggagctcaggaggctggggaaatggttggtgggaggagatgaggcctgagccctgttggccatgagaatggagaggagaggcccaagtagcatcaggggcaggagcgtggggctggatactgacaggctgtggccagcgagggagaaggagggaggaagggaggacggcaaatgaggtttgggcctgtgactgggtggatggtggggctcccatcatgaggagcgtgggagctggtctgggctcagcatgggacatgatgaatggcctgaggagatggctggggtaggtggaggcttgggcctgtgactcaggaaacatttaggagacagtttctatttggtggctgaaaccacagaaatgcctgcgacggctctctttgagaatggctgcctcctaggggtatgggtgtgccataagactatcttggagatggagaagcagagatagggccagaataggatggggtcagatctgggctgcaccttgttccctgctggtagtaccctagggttttttttctttcttttttcttccttttttttttttgtagagacagggagttcaaggccagtctggtcttgaactccaggcgtcaagtgatcctcctgcctcagcctcccaaagttctgggagtacaggcgtgaggcaccgccccagcctgatccccgagtcttttgcttggctgagccataaccacgcactcccttgtccccagagccctacagccccgccgtgtgggtgatgatgttcgtcatgtgcctcactgtggtcgccgtcactgttttcatcttcgagtacctcagtcctgttggttacaaccgcagcctggccacgggcaagcgtgagtcccccttcctccatcccccgcctcggagatcccgaaccacagagacagagaactacatttcccagcagcccctggagggggggcggtcaagctagggcctctcgggaggtgccagatgccttgagggccactgggaattgtagttctttctttttttttttttcccttccttattgagaagggatttggggtccatgtccacgtcctggccccctgcaggccctggcggttcaaccttcaccattgggaaatccatctggctgctctgggccctggtgttcaataattcggtgcccgtggagaacccccggggaaccaccagcaaaatcatggtgctggtgtgggccttcttcgccgtcatcttcctcgccagctacacagccaacctggccgccttcatgatccaggaggagtacgtggatactgtgtctgggctcagtgaccgcaaggtgtgtgtgggcccagggctgggctggagctggggctggggctggaggtcacagagcttgtcatgtggtagattagaggggattcttgcggggggcgggggtgagaggggtggggggagggcgggaaggggtctcttcccaaggagaattccagaatggtagaatggaatgttgtggatgaagaaagaacacggttcacgatgagctatttaaaatattcctagggaagagggtgtccctgaatgttctaggggcagttgtgtcaaataggatattctagaaccagtgcttctctcaaactgtgaggaaggattaatttttgaaacttctaaggctggg[138 bp omitted]gtgacaggcacctgtagtcccagctacccgggaggctgaggcaggagaatggcgtgaacccaggaggcagagcttgcagtgagccgagatcgccccactgcactccagccagcgcgacagagttagactctgtctcaaaaaaacaaaaaactgctagtccattgcagacaatgcttttgtaaaattcaacggaaatgaattattagaaaag[143 bp omitted]tgaaacctcgtctctaataaaaatacaaaaattagccaggcgtggtagtgggtgcctgtagtcccagctacttgggaggctgaggcaggagaatcgcttgaacccgggaggcggaggttacagtgagccatgattacgccacaaatagaactgattcctagcctgggtgacagagcgagactctgcctaaaaaaaagccaaactcacatttttatttattagattcaacagacgaaaaagaattctgtcaaatcactctaaatgctcactctctccattcctgtacacatctcactgcaatcaccgtttgttgagggactggtggtttgcagagcatactttgagactaaagtgattaactagctgggtgtcatgacctattagaggcttgagaaatcagtttgatgggttgcaataagcattttttaatggaatggagtagaatagaatagttgcctgcatcttatgtataagtttggttttacaaaacttgttttagttgtctgggcgcggtggcttatgcctgtaatcccagcactttgggaggccaaggcgggcggatcacctgaggttggtagttcgagaccagcctgaccaacatggagaaaccccatctctactaaaaatacaaaactggctgggcatggtggtatgtgcctgtaatcccagctactcgggaggctgaggcaggagaatcagttgaacctgggaggcggaggttgcagtgagctgacagtgtgccattgcactccagcctgggcaacaagagcaagactccgtttaaaaaaaaaaaagtgaactatttctgaacggattggtaaatagcaacagctcccagctcctgccatgccagcctctactcccaggacctcccgcgattcagtaagtgaagacttaacacctggcacatcaggggcctcagggaggcttctcgtgaacttttggatcacgtgtctgcaaccgtgtgtgctgggtgggagtggaaaagcattccctaatgtagtgagcgagtgttgagaaatattgaacactcctgggactggggtgtctgccagatagcgggtgtgtctcagaatgggtgatttatgttagggatgtccctgcggagggtgccctaatcactccccattctgccccagttccagaggccccaggagcagtacccgcccctgaagtttgggaccgtgcccaacggctccacggagaagaacatccgcagcaactatcccgacatgcacagctacatggtgcgctacaaccagccccgcgtagaggaagcgctcactcagctcaaggcagggtcagcgcagactcgggccgggggtgggggttgggccgctggggacctgaggatgctcaaagatggcaaggggtccaggttcattcattcagtcccagaggtcagccctgggtgggtcagcttggagggcggaggtcactgagggtggaagtggactcctcctcccaggagcaggctccttgggatattttctgggatgcagtatttctggattctggggtgagactgatggggctcaaatctttgctcttccccttcttggctttgtgaccttgggcaagttactcagcctctctgaacctctgtttcctcctctgtaaaatgaggataacaagagtatccccactgtaatgatcataaggttgttacaagaattatactagtaagccgggcacggtggctcatgcctgtaatcccagcactttcagaggccaaggcaggcggatcacaaggtcaggagatcgagaccatcctggccaacatggtgaaacctggtctctacaaaaaatacaaaaattagctgggcgtggtggcacgcgcctgtagtcccagatacttgggaggctgaggcaggagaatcgcttgaacctgggagtcggaggttgcagtgagccgagatcatgccactgcactccagcctggcgacagagcgagactccgtctcaaaaaaaaaaaaaagaattaaactagttagtccactcagaacatttatttatttatttagaacagtgcccggtgcactataggtgtttgctgatattatcattatcattagacctgaactcactggaatcaatgcttagattgtgtttcttatctttttacatccctttcccaaatcatagggatgaagttaaattcagaggccaggcgcagtagctcacgcctataatcccagcactttgtgaggcggagacgggcagatcacttcaggtcaggagttggagaccacctggccaacatagtgaaaccccatctctacttaaaatacaaaaattaggctgggtgcggcaacaggctcttgggaggccgagacgggcagatcatttgaggtcaggagtttgagaacagcctggccaacatgatgaaaccttgtctctacttaaaatacaaaaattagccgggcgtggtggcgggcgcctgtaatctcagctgcttgggaggctgaggcaggaggatcgcttgaatgcaggaggcggaggttgcagtgagccgagactgtgccattgcactccagcctgggcaacagagacagactccgtctcaaaaagaaaacaatacaaaaaaagttgagttcaggccccaaagtgcagcccacgaatacaacaaggctgagcacagtaactctctccccgtcctgcatttactcagtccttccgtgtgcatttttcttatcctctgctgtacgctaagcggtgaacaaatagacccgattcctaggtctagaggtgggaaatgaacaataaacatgcaaacagaaaaatcaagatctcttcagaaagtgatggtgagctagagggcggcagggctgggatattttcaccagggtgttcagggtgggcttctcggaggaggtgacatttgtgcagagccctgcaggaggtgaaagagctagccaggtggacttccggaagcagagccttcagacggagggaacagagtgtgcaaagggcctgaggaaggtgcagtgttggtttactggaggaacagcaagaaggccagtgtggttgaagggcaaggagctgaggtgagagagtagatgaggggaggattctgggcatgaggccaaggtcagggctggactttatgctaaaggcggtgagaagccttgaggtgtggagattttacgtaaggaagggtatgatctgatttctgtttttgtttgttttgagacaggatctcactctgttgcccaggctggagtgcagtagttcgatctcagctcactgcaacctccgccttccctgggttcaagcaattctcccacctcagcctcctgagtagctgggattacaggcgtgcactactatgcctggctaatttttgtatttttggtagagatgaggtttcaccatgttggtcaggctggtcttgaactcctgacatgaggtgatctgcctgcctcagcctcccaaagtgctgggattagaggcgtgagccaccatgcctggcttaaaaaaatttctaatgcccaatgcagtggctcacacctgtaatcctaaagctttgtgaggccaaggtgagaggatcacttaagaccaggagttcaa[143 bp omitted]ctcccgggttcacgccattctcctgcctcagcctcccgagtagctgggactacaggcgcccaccac[187 bp omitted]aatattattttgacacgtaatcagtataaacatgggtgagaccgtttacataatttttttccccacacgctgtctttgatatctgtggcattttacactcacagcacatctaggttcagagtgaccacatttcaagtgatccacagccctagtggcgtgtcactgctgcactggaccgcccaggtcgacatcacccaaatgcaaaaagtttcctagtcaacataatgaacagaaaatataaaagggcgctggccgccccccaggaccctgggactttttcacttccttactcacccagagcattctccccagccagcctgctgactcatctctcccccttcccccttcttccgttttcttctcgccagcccttccctccaggaaggaccctgagaattccagattctctcttctctctctctctctctctctcacacaaaacagggtgcctttccaggctgccacctcccacctctgcttcacttgcgccttcctcagaaggcagggatggctgcaaacagaatcactttcctcttttaccccttcagggatacctcacactgccagcctgctcagtccttgcagtgggagagcaagaattcagagactctcagtgggcgggcgggggggatcccattttctttttttgagatggagtctcgctctgttgcccaggctggagtgcagtgctgcaatctcggctcactgcaacctccgcttcccgggttcaagcgattctcctgcctcagcctcccgagtatttgggattacaggcatataccaccatccccggctaatttttctatttttagtagacatgtgatttcact[141 bp omitted]agcaagtggtgagaatgtgactagcaagacagaccagccccatctctcaaaatgaacctaaatctgtccccgccttgagttcagagaaagcaggatacctgtattttttttcccatacaaatgtcagccacatcaccagcctttaataagtaaaaatagctgaggcctcatcccgtgtctttttatagatatttttcatcttttttttattgagatatatacatagatacagtgaggtacagtgaggtacaaaaagcgtgcaactcattatttatacattcatagacatccatgtgaccaggtccagattaaggtatggtgaatttcccggcttctcataaagcttcccctgcccctccagtcaccatagaatatcatataattagttttgcctgattttgaacgtcctctaaacagaatcaaacagtgcatataataccttcctgtctggcttattttcctcagtgttatcaccagattgttccttcattgctgaataccgttgagtataccattatataaatataccataattctttcattctactgctggtggacattcaggttattgccagtgtttggccattatgaatattgctttttttcttttctcttctttctttttctttctttctttctttctttttttttttttttttctgaaacagagtctctctctattgcccaggctggagtgcagttgcgcgatctcggctcactgcaatctccgtctcctgggtttgagcggttctcctgcctcagcctcccaagttgctggaattacaggcgcctgccaccacgcccagctaatttttgtatgtttagtagagatggggtttcaccatcttggccagactggcctcaaactcctgacctcaggtgatccaaccgccttggcctccaaaagagctgggattacaggcataagccatcatgcctagctgaatattctcttttttaaacatgtgtaattgcctcttttttttttattttttatttttatttatttatttattttttcagacagagttttcctctgttgcccagactggagtccagtggtgcaatctctgctcactgcaacctccacctcccaggttcaggcgattctcctgcctcagtctcctgagcaggtgggattacaggcacacaccaccatgcccggctaatttttgtatttttagtaaagacggggtctcaccatgtt[135 bp omitted]tttgggggacatacacattccttttccttggttgtattcccataggtggaactacccggtcatagggagagtatgcttagctataacagatactgtcagacatcttccaaaacagttaggcacagtggctcatgcctgtaatcccagcactttgggaggctgaggcaggcaggtcacttgaagtcaggagttcgagaccagcctggccaacatggcgaaaccctgtctctacaaaaaaatacaaaaattagccaggtgtgctggcaggcacctgtaatcccagctactcaggaggctgaggtaggagaactgcatgagccctggaggcagaggttgcagtgagccaagaccacaccactgcactccagcctggctgacagagtgagactccctctcaaaacaacaaaacaaaacaaaacaacaacaacaaaaatccaaagtggttgtaccaatttacactctcatcagcaatgcaagagagttctacttgttccatat[138 bp omitted]cctccgcctcctgggttcaagcaattctctgcctcagcctcctgagtagctgggattacaggcatctgccactatgcccgggtaatttttgtatttttagtagagatggggtttcacca[141 bp omitted]tatcaagtcctgttctaactaatttaagttcacaattagtttgcaaaaaattaatcaaatcaatgttttgattcatagtcctggaggctaggcatcctcttggctccttcagagggctgtgagggaaggatctgtccaggcctgcctctccttggctgttgactcttgatccctgtatctcttcccatcatcttccctctgtttgtgtctctgtggccaagttcttttttttttttttttttgagatggagtgttgcccaggctggagtgcagtgacatgatctcggctcactgcaacctctgccctctgggttcaagtgattctcctgcctcagcctccttagtagctggtattataggcatccgccaccacgcctggctaatttttgtatttttagcagagatgggtttttgccatgttggccaggctggtctcgaactcctgacctcaggtgatatacccacctcagcttcccaaagtgctgggattacaggtgtgaaccaccgaacccagtcaagctcccccctccccctccccgctttttttttttttaattgagacggactttcactcttgttgccccggctggagtgcagtggcacaatctcggctcactgcaacctccacctcccgggttccagtgattctcttgcctcagcctccctcctgtagctgagattacaggcgtgtgccaccaagccccgctaatttttgtatttttagtagagacggagtttcaccatattgctcaggctggtctcaaactcccatcctcaggtgatccgcctgccacggcctcccaaagtgcttggattacaggcgtgagccactgcgcccggcccaagttcccctttttataaggacactagtcatactggattagagcccaccttaatgatctcattttaactggattccctctgcagaggccctatatacaaataaggtcgcattctgaagtactaggggctaggacttcaatatgtgaatttggtgagggaacacaactaaacccttaagacctcataaaaaatcttaggtgggtatgattggaaacatgaggagcagcaagcttcttgcatctgctaagtggcagaactaggactggaaccctggcagcccagttctacagcccaggttctcaccactaggctatattgcctcacatgtgcactgagtaacccagaatcactccttttgtccccctccctagaagcttcatgattcacaaaggacacccctgtgtttctcattgtcatctcttgctctaatttcctgcttctgctgaattctttttctccagtatcccttgttactttttcttttttttctaatttttagttctatatttatcagagttctccatccacatagtttggagagtcagatacaagaatttcagtttagtttagtttggtttgggagtcaaggtcgcactctgtcacccaggctggagtgcagtggcatagtcacagctcattgcagcctcaagctcctgggctcaagtgatcctcccgccttagcctcccaagcagctgggactacaggtgtgcacccccacatctgattaattttattttatttatttatttttttgagatggagtcttgctttgtcacccaggctggagtgcagtggcgtgatcttggctcactgcaacctctgcctcctgggttcaagtgattctcctgcctcagcctcctgagtagctgggattacagaagcctgccaccacgcccagctaacttttgtattttcaatagagacagggtttc[132 bp omitted]gtgtgtgtgtgtagagatggggttctcactatgttgcttaggctggtcttgaattcccaggctcaagtgatcctcctgcctcagcctcccaaagcaccaggattacgggcacgagccaccgtgcctggaaagaattttatctttaaggaaaaaaatggcaccctccatttctctcagcccagaggaatctactttcaccttgtttattgtatcactttgtgatttatctccctatctctaaataccatgtttgcatgactacctcttgatttttcaattttaggcatttttccatccgcttctcactatggaagacatactcatactcttatttaaatcaattcagcctcccacattgtgactctgacagatgaatattcagtgtttacatgttatgactatgtaaatgctctcacagctgccacagtagtaaaccgtgattactttcctctcctacacaattctttgtttttctttcttttttttcttgagacagggtctcactatgttgcccaggctggagtgcagtggcgtgatcttggctcactgcaatctgtgcctcccaggttcaagtgattctcctgcctcagcctcccgattagctggactacaggcgtgcgccactgcgcctggctaattttggtaattttagtagaggtggggtttcaccatgttggccaggctggtctcaaactcctgacctcaagtgattggcctgcctcagcctcccaaagtgctacgattacaggcgggagccatagctcccagctgatagggggtttcaccatgttggccaggctggtctcaaactcctgagctcaagggatctgcccacctcagcctcccaaagtgttgggattacaggtgtgagccaccatgcctggtctatttttcttgaggttagtaactgtcttttttctttttctttcctttttcagttgcttcatggctgtgttttctttgtggttaactaattcaaacccaaattatctgtttactgtctaaatctcttcttggtatgttcagaagtatattaatatacttaatatgttagaagtatcagatactctgttaatttcttttttcttttttcttttttttttttttttgagacagggtctctctctgtcactcaggctggagcacagtggcacgatcttggctcactgcagcctctgcctcctgggttcaagcgattctcatgcctcagcctcccaaatagctgggattacagtcgtgcaccaccacgcccagctaatttttgtattttttgtaaagtggggtttcgccatattgaagagcttggtctcaaattcctggcctcaagtaatctgttcacctcggcctcccaagtgctgggattacaggtgtgagccactgtgcctggccttgtcaatttcatcttattgaagaagttgctcttatggccttctggcctgctccagcctgggcatagccgccatcttgggatcacctttcaccttcatcccttcatctctggtttggatcctgttgtagcacaaattctaactctttctgggttttgcttccttgttcttttgagcttcctgacagaggcacatagcgggtatatttttggagacattgcaaatctgaaaagtctttttttctgtccttgtacttgatggacagtcaggctgggtatagaattctgcattagagctcattttccttcagaatttggaagagtcactctattgttttctaatatccagtgctactgtagagaaatccaagatcattctgattcctatgcctttgtatgtaacctgttgtttcttttccttgtccttggtggactgacatttatcagtgacatgccttgatctgtttcccttttttttttttttttgagacggagtttcactcttgttgcccaggctggagtgcaatggcacgatctcagctcactgcaacctccacctcccaggtacaagcaattctcctgtctcagcctcccaagcagctccgattacaggcatgtggcaccatgcccagctaatttctttgtatttagtagagatggggtttcaccatgttagtcaggctggttgcaaacttctgacctcaggtgatccacccgccccagcctcccaaagtgctgggattataggtgtgtgccaccgcgcccggcctgctttcctttcttttcttttatcttttctttattttttatttttttgagacagagtcttgctctgtcaccaggctgaagtgcagtggcgtgatcttggcttactgcaacctctgcctcccgggttcaagccattctcctgcct[226 bp omitted]atgttttccaggctggtcttgaactcctgggctcaagcgatcctcctgccttggcttcccaaaatgctgggattacaggcatgagccatgcgcatggccattgatctgtttccgttgctgggtctttcaatcgtattctcatgtcatttgttctgagaaaatttcttgaattttcttaaattcttttatgtacaatatctccctctccttcatttctctgtttgtttatttatttatgtttagagacagggtctcactctgttccccaggctagagtgcagtgaggcaatcatagctcactgcagccttgacatcctgggctcaagcaatcctctcgcctcagcctcccgagtagcttggactacaggtgtgtgccactttcgtgtagagacgggggtctcactatgttgcccaggctgctcttgaactcctaggatcaagcgatcctaccaccttggcctccaaaagtgttaggattacaggtgtgaggcaccatgcctggccagaaactggactttctttttttttttttttatttcattttgcttttttttgagacagagtcttgctctgtcacccaggctggagtgcagtggcacgatctctgctcactgcaacctccacctcccgggttcaagtgattctcctgcctcagcctcccgagtagctggttctacaggcgcccgcaaccatgcccagctaatttttgtattttcagtagaggtggggtttcaccatg[131 bp omitted]tgggaggacgagaagggcggattgcctgaggtcaggagttcaagaccagcctgaccaacatggtgaaaccccatctctactaaaaatacaaaaattagccgggcatgatggtgggcgcctgtaatcccagctactcgggaggctgaggcagaatcgcttgaacccgggaggtggaggttgcagtgagctgagaccagcacattgcactccagcctgggcaacaatagcataactctatctcaaaaataaaaatagaaaataaagaataaataaataaaatttaaatgcaaatagccatatgtggcgagctagtggttgccatagaggacagcactagaaaattccatctttacagtgaggcacaagggagaggcagctcccagggctctggccggctcgcaggccaaacgtgggctcaccctaccgcttccggcaagtaaccccacagggggagaaaggaaatgcacgtcctaaaaagaaatagagaaacacagcttctcctcccagccagttcttggtgccctttccatgagagatgtgcaatttctcactcactcaagaggggcaaaaaaggaaatatcaaggcccctttccgtaatgtaagcattatttttttttcttttggatcaattaaaatatggatgcattcacactcacacattccaaactaacagtacacactgttctcatcttgcctttttccacggagaaagcccttttggcatcttttctgtgttaatggaatcctacttctcagctccagtgtctgggccatggaaggcctcccttggaccagtctgagtttactcatttggccgcttcttttctttttttttttttttgagatggagtctcgctctgttgcccaggctggagtgcagtggcgcgatctcggctcactgcaggctctgcctcccgggttcataccattctcctgcctcagcttcccgagtagctgggactacaggcgcccgccacctcatccagctaattttttgtatttttttagtagagacggggtttcaccgtgttagccaggatggtttagatctcctgacctcgtgatccgcctgcctccgcctcccaaagtgctggcattacaggcacaagccaccgcgcctggcggccgcttcttctattttcttttgagatgcagtctcgctctgtcacccaggctggagtgcagtggtgtgatctcagctcactgcaacctccacctcctgggatcaagtgattctcctgcctcagcctcccgagtagctggaactacaggcacacgcaaccacacccagctagttctttttatttttagtagagatggggtttcaccatattggccaggctggtcttgaacttctgacctgagatgatccgcccacctcagcctcccaaagtgttcttgggattacaggcgtgagccaccatgcctggcccacttcttttcttttctttcgaacttcttttttaaaaatttttaattgtatttttttttttacagatggtctcactatgttgcccaggctggtctcaaactcctggcctcaagcaatcctcccaccttggcctcccaaagcgatgggatgacaagcttgagtgaccactccctacctgaacttttgttaaatttattcctaaatattttattttattttattttttatttttttgccagtgtcaaactcctgaccccaaggaatctgctggcctcagcctcccaaagtgctgggattataggcatgagccaccgcacccagcctggaattgttttaatttcattttaattgttcattgctagtatataggaatataatttatttcacatattttgtaatttatttcgtatattgatcttgtatcatgaaccttgttgaacttctattagccataataatttttattgtggatcctttgggatttttctatatacaattctattaattcgctagggcagccataacaaaataccatagactgagtggcttacacaacagaaatgtatcgccccacagttgtagaggctagaaggtcaaaatcaaggtgtcggcagtgatggctccttttgagggctgtgggaggacctcttccagaccttcctccttggcttgtaaaaagctgccgtcttcctctgtctcttcaccttgtctaccctttaagtgcccattcagccacttgtttttttttttttttttttgagacggagtcttgctcttgctccattgcccgggcaccatctcagctcactgcaacgtccgcctcccaggtttaaacaattctcctgcctcagcctcccaagtagctgagattacaggcgtgtgccaccacacctgactaatttttgtatttttagtagcaacagggtttcgccatgttggccaggctggtcatgaacttctgaactcaggtgatccgctcgaggttcaagcaattctcctgcctcagcctcccgagtggctgagattacaggcacatgccaccacacccggctaatttttgtatttttagtagagatggggtttcactatgttggccaagctggttatgaactcccgacctcaggagatccgtgccccgggcggcctcccaaagtgctggggttagaagcatgagccaccacacccagccgtccagccatttcttagtaagcacctagtgtgtgctaggcactgttctagaccctgtggatacagtggtgaatcagacgggcaaagtccctgcctcatggaacttaaattccagtgaagggagacgtgcaatgcacggaataaatgagaatattctatagtgcattccaaggggatacgcgctatgggtaaaaatagggcagggtgaatgcatttggaaaactggggcgggagactggaggttgcagtatcaaatagggtgctcaggaaggtgtctttggagcaaacacctgacggaggttgtaactgcccagtgggttcacgttgcccgctgcctagacagagccgatttatcaagacggggggtctgcaatggaaaaagagtcattcacgcagagccggctgtgtgggagaccggagttttattatcactcacatcagtctgcctgagcatttgggaaccagagtttttaaagataatttggcgggtaggggcttgggaagcggggagtgctgattggtcaggttggagttggactcacaggcggtcgaagtgaggttttcttgctgttttctgttcctgggtgggatggcagaactggctgagccagattaccagtctgggtggcgtcagctgatccatagagtgtagggtctgtagaatatctcaagcactcatcttaggttttacagtaatgatgtcatccccaggagcaatcgggggagccagaggctgcatggcccctaaccttaatttctaatcttgcagctaatttgttagtcctgcaaaggtagactagtccccaggcaagaagggggtctttttaggaaagggctagtatcgattttgtttcagagtcaaaccatgaacagaattccttcccaaagttggtttggcctatgcccaggaataagcaaggacaacttaagggttagaagcaagatggagtcagtcaggcaaaggcactttcaaggtgagagagtgagtcaggcagctgtctaggagaagaatgttccagcaggcagaacagccagtgcaaaggccctggggcaggagcgagctggagaggtccaggtgcatctcccaggccagagtgagggggggcttgggagatgagggcagatgggtaaggagggatggggtgtcaggtggcacagggcctctaaactcgaggtgatccaagtcactctgagtgacgaggggagccaagagggggtggtgagctgaaaagggacagcgctgactcaaatgttaagatccctctggtgacagagtgggaacaaacaagaaagaaaggacggatgcagggaattttaatttttccccaacctacacccaaacaaaggctgtaggaaatggctgaggtctttttgttttgttttgttttgttttcgagacagggtctccctctgtaacccaggctggagtacatggcacaatcatagctcactgcaacctcatcctcctaccctcaagcgatcctcccacctcagcctcccaagtagctgagatgacaggcatgcaccaccaaacccggctaatttttaaagtttttgtagagacaggtctccctttgttgcccaagctggtctcgaactcctggacccaagcagtcctcctgcctcagcctcccaaagtgctgggatgacaggcatgagccagggcccctggaatggctgagttttaatagatatttagggaccatgaaggggtggtggatgcgagaggggagggagacagtatatcccagaaaaactgagcaaaccattgaaagtgaatgctgttagagctcctctttctgaaatctctcaaatatttccaccactggaagccttgacttttagctttctccaaaatgtaacttgagtctctccttccactcccgcttgtcctctgaggacccctggagacactcctcccatcttatcccagtcccagcccttctatccctaactctagaaactccacattcttcccacttaaacatcaatagcacttcacctttcacccccaagggcatcttcctaaacaaagagaaacgtagggaaaaattacagtttgcctacaaggcagaagtgcctgcaggcagtggtggtatttttctcgcctatacttatattccagatgtcatatgggaactccctgttaggatctatataaaattaattcaaaccccattctccaacggtgggatgatgaatgtcctccccacgtttctgctaattctccggagcttcacattctccacccctgagtctttgcttcagctagagacattcaatttgggggatccacttcctgtctgtttccccacttagcatgtatggactaattcagtccttttctctaatttccacgcaaacaaccacacacacacggcatttatatgtgagcctgtgagtgcgtggacagggtttttctgaaggtttggggacataggaggacttaaatcaacagacaggctaactactcaagactagaggttaagtattcttctctggaagatcctttggcttctcttcaactcagcatccagccgcctttttttttttttttttttttttttttttgagacggagtcttgctctgtcgcccaggctggagtgtagtggtgcgatctcggctcactgcaacctctgcctcccgagttcaaacgattctcttgcctcagcctcctgagtaactgggactacagatgcctgccac[175 bp omitted]ttcgccatgttggccaggctggtatcgaactcctgacctcatgtgatccgcccgcctcagcctcccaaagcgctgggattacaggcgtgagtcactgcgcccggccaatatgaactcatattctatataggattctgggagtaatttttgtgttcatttgttttgtttttagagacagggtatccctctgtcacccaggctggggtgcaatggtgtcatcatagctcactgcagcttcaaactcctgggctgaagggatcctcctgcctcagcctcctgagtagctgggaatataggtgcatcaccacacctggctaatttttttttttttttatagaggcagggtatcactatgtggcccaggctggtctcaaactcctgggctcaggcgatcctcctgccttggcctcccaaagtgttgggattacaggcatgagccatcatgcccagcctaactttttaaaaaatacaccccataaggtcaggtgtgaaagctcatgcctgtaatcccagcattttgggaggctgaggcaggaggattgcttcagcccaggagtttgagaccagcctgggaaacagagtgagaccccatctctaaaaacaaacaaacaaacaaataaataaataaatatttaaaaaatatataaaatacaccccatacatccttacctgtcagagcataagcatttatctcataccacagaagagttacacagtattcctctgtgtggattcatttattcattcattcatttattctgcaaatatctatcaaccccgtcctacatgccaggaactatgccccagccacagatgagaataagaccaactgggaccctgggggtcttgcagtctcatggggaaggttgagattaatcaaacaaccacagaaataaatgtaaaatgacagcagttgtaaatgagagtgatagcagcatgtgccataacaaatgcatccatgagaactaactccacagccctgcccttcttcccaccaagtcttagaaatcagggcctaggctgggcacggtggctcatgcctataatcccagcaccttgggagaaacccactttgggaagccaaggtgggacgataacctgaggttgggagtttgagaccagcctgaccaacatggagaaaccccatctccactaaaagtacagaattagccaggcgtggtggcacatgcctgtaatcccagctactccggaggctgagacaggagaatcgtttgatccggggaggcggaggttgtggtgagcccagatcgcaccattgcactccagcctgggcagggcctaggccaagtgtggtggctcacgcctgtaatcccagcattttgggaggctgagttgggtggatcaactgaggtcaggagttcaagaccagcctggccaacatggtgaaaccccatctctactaaaaatacaaaattagccgtgtgtggtggtgcatgcctataatcccagctacttgggtggctgaggcaggagaatcccttgaacctgggaggtggaggttgcagtgagctgagatcacgcctctgcactccagcctgggggacaagagtgaaactcggtctcaagaaaaaaaaaataaataaataaataaatcagggcctagtgggagaacccaagcaagttatgtgtctgggtctgtgttttcccatctgaaaagaatggttatctccctacaggctcacacctgtagtcccagtactttgggtggccaaggcgggaagatcacttgagcccaggagttagagcccagcctgggcaacatggaaaaaccctgtctctacaaaaaatacaaaaattagccagatgtggtgatgtgtgcctttagtcccagctactgaggaggctgaggcaggaggttcggttgaaccgaagaggtcaaggctgcagtgagctatgatggtgccactgcattccagcttgggcaacatagtgagacctcgtctcaggaaaacaaaaaaaaagtgtccttagactagatagaacaatgcttggcacaatataactgatcattcacttgcattatttttttccctcaatcttcctctttatttgttttgagatggcatctctctctgtcacccaggctggagtgcagtggctcgattttggctcacagcaacctctgcctcccaggttcaagcaattctcctgcctcaacctcctgagtagctgggattacaggtgcctgccaccacacctggctaatttttgtattttcagtagagatggggtttcaccatgttggccagactggtctggaactcctgagctgacaggtgatccacctgccttggcttcccaaagtgctgggattacagccatgagctaccatggccagtctcaatcctcttttttaaaatgcaagagtaaatggactctttggagggctatggtgaggagtaaaggaataactatttcattaacagtcacagctggccaggtgcggttgctcacgcctgtaatctcagcactttgggaggctgagacaggtggaccacaaggacaggggttcgagatcagcctggccaacatggtggaaccccgtctctactaaaaatgcaaaaattagctgggcgtggtagtgggcacctataatcccagctacttgggaggctgaggcaggagaatcgcttgaacccaggagtcggatc[136 bp omitted]tactatctaagctttccctatagtccctgctactggggaggctgagataggaggatcgcttgagcccaggatttctggtccagcctggacaacatagcaagaccctgtctcttaaacaacatacttttgcaacaactctgaagggagatactgctgccatgcccattttactgatgttgaaactgaggcactgagaagtgcaatgatttgctcaagagctcagggccagttaggatttggagcagttggaggttacaggtgaggaggttccaggcctggcggccagggcatctaggtgggactgaccctaccctccattccccctccccccaggaagctggacgccttcatctacgatgctgcagtgctcaattacatggcccgcaaggacgagggctgcaagcttgtcaccatcggctccggcaaggtcttcgccacgacaggctatggcatcgccctgcacaagggctcccgctggaagcggcccatcgacctggcgttgctgcagttcctgggggatggtgcggctgcacacagggatttccacagcggagagggggagggcgaggcccctgggttccggggaagaaagggacaaagacccggacaccagggtctgagggaggaaggggctaagggcctacattcccacatcacagacaagggtcctcagagggtactcatagcaggtgacttttgaccgcccctccctagatgagatcgagatgctggagcggctgtggctctctgggatctgccacaatgacaaaatcgaggtgatgagcagcaagctggacatcgacaacatggcgggcgtcttctacatgctcctggtggccatgggcctgtccctgctggtcttcgcctgggagcacctggtgtactggcgcctgcggcactgcctggggcccacccaccgcatggacttcctgctggccttctccagggtatggggcagagagggaggcagagagggggagatggcaggggcggggacaaaggtaaagccgagcagagacaaggagatgtgggtcgagatgtggatagtggggaagagagcgggaaacacaggcgggtaaatggagaggagagagggactgaggggaggcgggcaggcgtcctgggcatctcgcgctgacccccgtcctgtccccggacccgcagggcatgtacagctgctgcagcgctgaggccgccccaccgcccgccaagcccccgccgccgccacagcccctgcccagccccgcgtaccccgcgccgcggccggctcccgggcccgcacctttcgtgccccgcgagcgcgcctcagtggaccgctggcgccggaccaagggcgcggggccgccggggggcgcgggcctggccgacggcttccaccgctactacggccccatcgagccgcagggcctaggcctcggcctgggcgaagcgcgcgcggcaccgcggggcgcagccgggcgcccgctgtccccgccggccgctcagcccccgcagaagccgccgccctcctatttcgccatcgtacgcgacaaggagccagccgagccccccgccggcgccttccccggcttcccgtcgccgcccgcgccccccgccgccgcggccaccgccgtcgggccgccactctgccgcttggccttcgaggacgagagcccgccggcgcccgcgcggtggccgcgctcggaccccgagagccaacccctgctggggccaggcgcgggcggcgcggggggcacggggggcgcaggcggaggagccccggccgctccgcccccgtgccgcgccgcgccgcccccgtgcccttacctcgatctcgagccgtcgccgtcggactcggaggactcggagagcctgggcggcgcgtcgctgggcggcctggagccctggtggttcgccgacttcccttacccgtatgccgagcgcctcgggccgccgcccggccgctactggtcggtcgacaagctcgggggctggcgcgccgggagctgggactacctgcccccgcgcagcggtccggccgcctggcactgtcggcactgcgccagcctggagctgctgccgccgccgcgccatctcagctgctcgcacgatggcctggacggcggctggtgggcgccaccgcctccaccctgggccgccgggcccctgccccgacgccgggcccgctgcgggtgcccgcggtcgcacccgcaccgcccgcgggcctcgcaccgcacgcccgccgccgccgcgccccaccaccacaggcaccggcgcgccgctgggggctgggacctcccgccgcccgcgcccacctcgcgctcgctcgaggacctcagctcgtgccctcgcgccgcccctgcgcgcaggcttaccgggccctcccgccacgctcgcaggtgtccgcacgccgcgcactgggggccgccgctgcccacagcttcccaccggagacaccggggcggggacctgggcacccgcaggggctcggcgcacttctctagcctcgagtccgaggtatgacgcggccccgggggccccaccgcccccttggtcagcgcaggccacggcccgagggggcgcccgcagtggacaggacccgcgtgggttgggaaggaaagcagtggaactggccggaccccgcctggagcagcgtcctgcgccccctggttctggaggaaccgcaagccggagaggatttggtccctcaactatcacccagcctgagaacgagggggcgggggccttggagcccaccggacttttttttaaacccgacaagggctttttaacgtcaccagatggggcgggaggtggggggttcacgccactcccgcgtcccacctccacgcccggggccgtggcccccacatcactgtgcagctccccggccccagccgcgcctccggggaagcccgtttttaacctttcatccattgggactcaaaactgtgagacgcgttcgccaaactgtgaccccagaccttggccccgccacacagaaacccctgacccagactgtgacatccgactcctaaaatggtcatccgactccagactgtgacccctgaccccaaactgtgacccgaaccccagactgtgccccgaccagactgtgacccttgacatcaaaccgtgacaccccctcctcctcttccaccctcggtcgcttttccctactctgacctaggacacgtccccaacggaagccccgccttcccttgcaccgcgatgaacccaacctccctgaagccaaaacttcccaccctgccgcacctccggaccaccccacttgccaccaagcacatcctctccaaatccaacccttatttgcgacccttcagtgatgacccagcagacctccaaaaagcctcctctgcccagatctccagccgggtctggggctgggttgcggaggggagggtctgggagtccacacttctccaccaacttcccttcccactctcttattccacattgcagtgtttggaataaaccatgtttttatgcctcctcagtccaagcctaagctccgtatctgttagcccccctcaaattctctggaggaaacagaaacacaaaagtcccacaggggaagaggagacagaattagagagagaacagagactctgaaaggaggtgcctggggagacaaagaccaagaaagaggaggtgggaagagaccctgaaaagaaagtcgagagggtactggggcagataagagaccccaagagagtggtgagatagatcccggagacaaaacatattaagatcaaaggtatggttttatttcctatggctataggtaccaaggcttgctacattctcaatatcctgttcatgcaagctaggagagtgtctgacatatcccagccaatccgcattatcttgaatgctgttaatctcaccaatgagaatctatttctaacatttcattatgtcaattagccaaaccgctggtgctgatgggcgataaagagagacgaagcacttgtaatagctgcctccagagggtggactttctgattaagtgctcgctgaccagagctgaaatgtgaatgtctggttaggcaattgactgcccctagagggtagattgaaccgcctaacttacagataatatccatcctgtctacaagaaagcatttttgaaacaaatgaaagccatcacaacagagagaggaaaagaaaccggccttatgggtcctcggggagtagaaactcagtctccttgccagtgaaagagcaaatttgcatatatgaataattaattaactggaaagaacgctctcggaatcaaactggacaatggggaaaacaagcctcccgtagaactacaactcccagaaggccttgccactaccgcgaggaacagcgcccaaagtcacgcgaagatgcagtttctccgtatccgcaggcttctttcgctggcgccattacctgagttctcctccagcgtttccgcaccctctccgattagcggtcccaggagtttccaaggtaaccgcgcagtagggcggatctcattaggcggaaagcgaaacccggaagtgacgctcttaccgggtgtcagcagcgagagggttcgaagatggcggcgcgcaagggtcggcggcgcacgtgtgaaaccggggaacccatggaagccgagtccggcgacacaagttccgagggcccggcccaggtctacctgcccggccgggggccgccgctacgcgaaggggaggagctggtcatggacgaggaggcctatgtgctctaccaccgagcgcagactggtagggctgagtccggactccagggtcctgaggtggctgatcccgagcctttaacctgagaggtgctcgggaagagaaggctggggtctaagagaagtgatttcataccggaggcggttgatccatgagggaggtggggactgagctcttactgtcccgtcttaactcgtaaaccccgccttccatccccaggcgccccctgtctcagctttgacatagtccgggatcacctgggagacaaccggacagagcttcctcttacactttacttgtgtgctgggacccaggctgagagcgcccagagcaacaggtaagacccgaggcttttccaggaccaggaggctcagtttccagccccttcctcagcacccaggagttagggcttccagtttctgcctctcgcagatccaggagtctgggtttccagcctctctccttcctaagaatcctggaatctagtgcctaactcaccccacaatttctcccagactgatgatgcttcggatgcacaatctgcatgggacaaagcccccaccctcagagggcagtgatgaagaagaagaggaggaagatgaagaggatgaagaagagcggaaacctcagctggagctggccatggtgccccactatggtggcatcaaccgagttcgggtaagtatggtcccaggagcctgctctgcatactctgaaacacatctgacccatcccctgtgtccataactcccaacacctcctcatgttcttttttttttttttttttttgagacgtagtctcgctctgtcacccaggctggagtgcagtggcgcagcctcggctcactgcaacctctgcctcccaaagtgctgggattacaagcgtgagccaccgtgcctggcccattttttttttttttttttttgagatggagtctcgctctgttgtccaggctggagtgcagtggtgcgatcttggctcactgcaacctccccttcccaggttcaagggattctcctgcctcagcctcccaagtagctggggctataggcgcctgccaccaggcccttctaattttttgttttttggtttttttttgagatgaagtcttgctctgtcgcttagactggagggcaatggcatgatctcagctcactgcaacctctgcctcccaggttcaagcgattctcctgcctcagccaagtagctgagattacaggtgcgcgccaccacgcccggctaatttttgtattcttagtagggacggggtttcacaatgttgatcaggctggtggtgaactcctgacctcgtgatccgcctgcctcggcttcccaaagtgctgagattacaggcgtgagccaccgcatctggccaattttttgtatttttagtagagacaaggtttcgccttgttggctaggctggtctcaaactcctgacctcgagtgattgatccgcacgcctcgggcacccaaagtcatgggattacaagcgtgagccaccacacccggcctccttcagtttttagaaaagtacttgtcacatagttttatacaatttagctattatgatcagtgtcattacatgttaggtactgttttagattatgaggatatggtttatgttcttcacttttctctttggtaacatagtgagttatagaacttatctgatggggctggcatgaggtcaaatgaaataacatatagtgcctagaatagcacctggttgtaatatgaggtatgtattttctgttactattcaggaactgtttttggttgtggctgtttgttttgtttttgagtcatggtttcactcccattgcccaggctggagtgcagtggcgtgatcttggctcactgcaacctctgcctcccaggttcaagtgattctcctgcctcagcctcccgagtagctgggatcacaagtgcacaccaccatgcccagtaatttttgtatttttagtagaaatggagtctcattatgttggccaggctggtcttgaactcctgagctcaagtgatctgcccaccttcgcccccaaaatgctgggattataggcatgaggcactgtgtccagcctgtttatttgttttttgcttcaaagctaaaacatcttctgatcaggtagacttgtaagtacaatgatacggtatatgaagagcacttagagcagtacttggctgatagctggggctgtctgtttccatgaaattatttttactatgtttcagtactgttctagatgcagaggatttagcagcaagcaaaaggtctctggctccatcaacttacacactagtgggggaagggaacgagatgaaactaagtaaatgtgtaccatgtccaaaggtgttaactatcctggaaaaaatccaatgaagtaggggaagagggttagggtgctccaggagtggggtgctatttttaaacagtgtggttaggaaagtattctgtcataaaatgccatttgcatagatactcacaggtagtggggcagtgaaccctgtaaaagaatttgcaggcaaggaaaaacacaagttcaaaggccctggggtgagcttggcatgtttgaagagtttcaagtgaagcgggagtgtccagtctgtctggagcagaatgaacaaaagggagaatgacacaatttggggagcgggcacagagaagacattgttcagagccttgtcggccactgtaaggactccagcttttaattgggagacgttggagggtttcaggcagaggaaagacagggtctgacttctgttttaaagtggtccctctggctgctgtccttaaatatcaattgcagagaggtaagggtcggaggaaagaatcctgtggggagacttacggtattcaggggaaggatgacatcagtagtagtgtgacagcaatagacatcatgagaagggggttggaagtgagcttttttttttagatgagacagagtctcgcttttgtcgcccaggccggagcgcaatggtgcgatctcggctcactgcaacctctgactcctgggttcaagcgattctcctgcctcagcctcctaagtagctgggattacagccacccaccagcacgcccgactaatttttgcatttttagtagaggcggggttt[131 bp omitted]cataggtgctgggcatgaggaccaagaatgagttctgaattttggggcctgaggtggagagagagcagttgcaggtggcaattaggagcttggctttggttgtatcaagtttgaatggtcaggctggcacagtggctgatgcctgtaatcccagcactttggaaagctgatgcagaaggatcgcttgagaccaggagttccagaccagcctgggcaataaagtgagaccctgtctctacaaaaaaattttaaaagccagatgtgatggtgcttacccatagtcccaactacttgggaggctgaggtgagaggatcacttgagcccaggaggttgaggctgcagtgagccattatggcatcactgcactccgtcctgggcaacagagcgggaccctgtctcaaaaacaaaaaagtttgaacggtcaatgcagtaagagtctggagcccaggggagaggtcagggctaggggtattggaaacctcgtggctggactgggtctcctagtgaacaaacacagaggcaaggagatccgaggactgagtcttgtggccttctagcatttagagggttaccgagaccaggagcctgaacaccctcccaagggctggtgggaattgcagcctcaactcccaggcatcctggggctctatcctcccacctcagctcccccacccactcccaccccctgtggagagctgtcccagttaccatgctggtttttgcaggttgtgattttcttcccacagaggtttcaaggagctgtagtcccaggcctgggagatctgaggaagcgcacttctggttctctgggatatggggagcgtggggtcagtgccttgatcctcctctcccctcgcttcacatcacccttcccccaccgctcttctgcaggtgtcatggctgggtgaagagcctgtggctggggtgtggtcagagaagggccaggtggaggtgtttgcgctgcggcggcttctgcaggtggtggaggagccccaggccctggcagccttcctccgggatgagcaggcccaaatgaagcccatcttctccttcgctggacacatgggcgagggctttgcccttgactggtccccccgggtgaccggtgagtccctggggtgttcaggagtcccgggaggtcgggggagcagggtctgcaacaaggggccgggcgcttagactccaaggaggggagcgagctgcggccaggtggggcgaggtcatttcctgactcccttccccaggtcgcctgctgaccggtgactgtcaaaagaacatccacctctggacacctacggacggcggctcctggcacgtggaccagcggccattcgtgggccacacacgctctgtggaggacctgcagtggtcaccgactgagaacacggtgagggagggtggggttctggtcgtttagttctgatggattctaggccagggacctagaatcctaggtctgagggaaaagagggctgggagcctgacggaggtttagtttccaggccaagtcatagtaaggggaacagtgaaagagagagtagcccaccgctggcgcttgggcttcactgcgggctggggggcattgggaccactcagactccgcctcccccaggtgtttgcctcctgctcagctgacgcctccatccgcatctgggacatccgggcagcccccagcaaggcctgcatgctcaccacagccaccgcccatgatggggacgtcaatgtcatcagctggagccgccgggagcccttcctgctcagtggcggggatgatggggccctcaagatctgggaccttcggcagttcaaggtattttcccagccggacacctgggggctagagaagcttgctcccagcagcccctgggatttgtaggatttttcctccttgaatagttttacacaaccagagctggagagcccttagaactagactcctgcctcttcagggtacagaggaggaaactgaggctcagcaagaggaagggtggcgggtctccactcttggggtcactcactctaccaggggaacagctgacaagagatggaaggggctggggcagcagagactaggactctcatctgcctgtgggcagaagtacaggtgtctgtacggccagtgctgagagcttcagagagttgtagatttctagatgcaactgagaatcggggcccagcctgctcgttgtaggagaagactgaggcacagaaaggacaggagccgctgtgacatgacagccaagctagaggttgacattgtggagctgggagggtccctgtgcaggagaagttgcagcgtccggcatccctctggacaaagccgcagctttgtgtggctctgccttcccgggctgccatgatgtcatcctttttctcctccagtttgatcgtttctatagcgtcagccctggggaggaggctggagacggattccagcctcccaggcccaccaggtcacacagggcccagcttgttgaccattggaacttcagagcagcctctcctaatgagagagacgccaattgagcggggcctttgctgtagtgaaagtgctgtcattcttagtctttctttgggtcggcttccggggattgtgtttctgcctcctttgaggcctttgtagaatctgctgggagagctctgggagagccatgccctcctttttttctttttttttttttttttctttttttttgcgatggagttttgctcttgtttcccaggctggagtgcagtggcgcaatctcggctcactgcaacctcccgctcctgggttcaagcgattctcctgcctcagcctcctgagtaactgggattacaggcatgtgacaccagcccggctaattttgtatttttagtagagatggggtttcaccatgttgttcaggctggtctccaactcctgacctcgggtgatccacccgccttggcctcccaaggtgctgagattacagtcgtgagccaccgcacccagcccatgccctccttttacaaggaagaaaacaggcaggcagagggaagagcaggggcgggggttttgctacctgagctgggaggggcttctttgcaggtgaatcacagttcccagcaacccctgggctggtcagccttcttagcagccagaattaccctgtgtccctttcctggactctgggcttgtgagggcttaaggggtggggccctggctgaaccctgaggctggagaagggttggggcttctgcctgggtcctccccagagtcaggctgaggcattcagagcccgttcctcccatcctctccctctagtctggttccccagtggccaccttcaagcagcacgtggcccccgtgacctccgtcgagtggcacccccaggacagcggggtctttgcagcctcgggtgcagaccaccagatcacacagtgggacctggcagtggagcgggaccctgaggcgggcgacgtggaggccgaccccggactggccgacctcccgcagcagctgctgttcgtgcaccagggcgagaccgagctgaaggagctgcactggcacccgcagtgcccagggctcctggtcagcacggcgctgtcaggcttcaccatcttccgcaccatcagcgtctgaggcgtcccactggctctgatcttgcttcctgcttggaaactgaagtcgaattgggctcccctggaaggggttcattcaggtctgttgactgagactggccggcctgtgggctgccgtgatggattctgtttgacgtattgttctctagaaggcctggctctgatccagtgacccctctcaccaaagaactcggtttaaccagggctctgtaagaccactcccacccagagacttgtgtggcctggtgtggcctgtgtgtcggattccttcctgtcagctgtgacccatttgacctgtgtccccagaacccagttttttgtttgtttgtttgagacggagtcttggtctgtcgcccaggctggagtgcagtagcacgatcttggctcactgcaacctccgcctcctgggttaaagtgattctctcagctc[134 bp omitted]cggcctcccagagtgctgggttgggattacaggcgtgagccaccgcgtccggctcaggacccagttttggctgctggttcccagcaggggactcgggggatatacagtggctgcaccaaattggaggtgtgggttcctccaacacaatttgcttctgcccgttgtcttcctgccagctgggtttggccaggatttctccgtgtgggggctacatgcgaccctctcccctcctccctgactttagaggctggtgctgtgtcgggaggaaggtcagggctcctgagcagcaataaaggaccaggaagaggcctgaggtgtatttgagactctggtcctttggccacagccctatgaggaaacggggtgtggggggagtttgggggtggggaggaatttggcaccagctgcccccaggccgctaggctgggggaggccactgggagtccagtgcaacccaaccttccgcccactgggtgccgccgcgttctgccttctctaagtgtccttccatctggaactcactctggcttagtgaaaggggcctcatccctgacccccaccagcttatgaaggcttcatctcagggaactctggaccccccatttctccctccgtccatctcccctttatcacgtttctttctttcttctctgtgtccccctctttcagagtctcccgtcccccactgccagtctccctgccccctagtcgctgtctcgctcctccgccgctgtctcctgtccagcctgcctgggctgtggcccagccgctctgcctggctggcctccctggctccccctctgcggctctgagctagccccacccccggcccccctccatccagcctctgatccatctgtggactccgaggtcgggtgcccgtcacacggcccctgggaccaaggacagactacagcccctcagcacccacagaggcttcccctcagccctagccgaggagcccccagcggagggcatgggggtgggccgccccaacaggtacgtgcctccatgcaaggcaccgctgagccatcccctcctgctctgctgcgtcgcccccatccacccctgccccagcatccctgtcctcagcttgtccccttcaagaaggccttgtcttcccatcagtgacaggctcagcgccaggagaatccacccccaggttcagtgcctccaactctcaccccatccccattttatgcattttctcactggcttccatcctttcagagaaaccctctcagtctgtctgtctctgtctctgtctctctcccccatctctgtctctcccatctctctctgcctctctctgtcttcacaatttcatctccccatgtcgccatttcttaaaacatttcttttctccttttcgttttcccaattgccctgtccgcctctatcttctctgtccccctccatctaggtctctgtccccccctctctctgggtctctgtccccctctgtctctgagtctctatcctctcaaggtctctgttcccctctctctgggtctctgtcctctctcaaggtctctgtccctttctctctggatcaatgtccctttcctgctgccctctctgggtctctgtccccctctctctcagggtccctgtcctgcttggtccctgtactttttcttggggcaccctctcaacacccctcctcctgcctatctctgcatctctttgtctttctgtagtctctgctttccaacctgctgtccagcccccaccagtaggtggggagtggtggggaacacccctggtttcggaagagtgagagtgttgatttgggagggtgagggtggggcctgggggcggggcttcttggcctcagattagacagtgactttgacacgaagttgaagcaccttaagccctgtatctcctttatatggaaacattaagctgctctcgcaggtcaggtggaggatccctttccctcccgccctgcttttgctaggggaggggggtgccctgagcctgagtcgcagccagcctgggagctgggccatgttggccgcagatggccccctggtgaaggttcccgttggctttgggaagtagacaacgggtctgcctcacggggctgaggtgggactggaggatttcgagggcagaactctgggaaggaaagaaaggcttaggacccaaccagcattccccctggcactgcgggggcctggccagctcatggcgttccctgagcctgttccccaactgtgaaagggggtgatgatcttcacctcccggcatcctgagcggccaaggtgagcagtggggtctgagagtccagtgggggctgtgggcatgtcgggagctcatcacgaggcctcgtacataccaggtgtgtttgaaaccagagtgctcttgagaagactgtggtttgtcactcgggccgtggctcccaggaggcctgggtgggaggctagcttttgccactcctctccccactggctgagagacctgcgacaagggactaacctcagccccagttggcttttctgtgaaaagccaggtcccttcatcaaagggctttggtgagagatgggcaagtgggggtgagaggcccaggctggggcctggggagcacaggtcagtgtcagtgcccacctgcccccccagcccacgggggtggttcctgagggtggagtcagtgctgagtggggatccccaggctggggagggctgcaggtgtagatgctgcatcctgatgttgacctccaggccgcccccttgggcaacgagcctatttcccctttttgggagaacagtctctaacatgcagggttgtcaggggtgagatagagtcaaggttggggtacactgtgggcactggacacagccaggctggtcccctcacctcagccttgcctctgtcaagtgggcctaatgaaccctcgcgaatggccaggctgcctgcgtggttgtgggaagcaggtgcagggctttgggagacccagttggtgccaaacttgacattgtctcatggtcttctttccaaatggagtgtgccaggccctgccaagaagcccctgaggatccccaggttccagcacaaattatttaacccctggaatggtttgtcctgatccagccagttcctgggaagttccccaccacagggccaagcgtttggtaacgttgcagtgaaccctgaaggcaatgaggggtgcgggtccatgcccagccctttcctttggtccaccctgacaggctgctgcgattccctccatttcttttcttcctttattttttatttttaattatttatttattttttagagacagggttttgctgtcttccccaggctggttctcaaacccctggcctcacgcattcctcctgagttggactcccaaagtgctaggattacaggtgtgagccaccgcacctgccctcttttttttttttttttctttaagagatagggtcttgctctgttgcccaggctgcagtgcagtggtagagcatcatagctcactgcagccttgaactctgggctcaagtgatcccccacctcagtctccacagtagctgcatcaccatggctggatactttttgtttttaagatagggtctcgccatgttccctaagctggtttcagactcccgggttccaacagtcctcccaccttggcctcccagagtgctgggattacaggtgtgagccaccatgcccagcccccaggcctcctgcctttcacagatgagagctgaggctcaggaaaggatttgacctgtcatccatcacacacctagtaaatggttgagcaaactgagtctctggaaaaagaagccagagatcccaggggacatggtgggtgagcaactaagccaggactgggccctcatccatatggtaagaaggcccttcctggtcttttaagaagtcccaatttccccaccttacaatggaggaaaccgagactcagaaagagttgccaaagatcagagggtcgggcatgaggcccatttcatttattttacaatagcttcattgaaatctaattcacatatcatatcatacactcactacagggtacaattcaatggcttttagtgtattcacaattgtgcagccatcacaattaattttttttttttaaatggagtcttgctttgtcgcccaagctcgagtgcactcgtgcactctcagctcactgcaacctccacctcccgggttcaagtgattctcccacctcagcctcccgagtagctgggattacaggtgcgcgcctgtaatcaccatacccggctaatttttgttatttttagtggagacggggtttcaccatgttggccaagctggtctcgaactcctgacctcaaatgatctgcctaccttggcctcccaaagtcctgggattacaggtgcgagccaccgcacctggccagcataatgttttcaaggtttatccatgttgttgcatctatcgatacttcatttctctttattgtcaaatactattcattggatgaatataccacattttatttattcattagttggttgatacttgggtttccaccttttggctattatgagtaatgctgctgtgaacatttgtgtaccagtttttgcatctgttttcatttctcttgggtacataagtaggagtgcaattgctgggtgatgtggtaattctatgtttaaccatttaagtaactgccagactgcttcctacagcagctgcaatttttcattccccacagcagtgtatgaggatgccaatttctccacattctcgccaacacttgttttttttattatagccattctaagtgggtgcaaaatggtattcctttgtgcttttgatttgcatttctctgatggctaatgatgttgagcatcttttcatatgtttatgagccatttgtataccttctttggagaaacgtctgtacagatcctttgcctactttttttgtgcctcagcctccagagtagctgggactacagatgtgcaccaccaggcccggctaatttttggatttttaatagagacgggattttgccatgttggccaggctggtctcaaactcctgagctcaagtgatccagcttcctcggcctcgcaaagtgttaggattacaggcgtgagctgctgtgcctggccccctttgcccacttttaaattgggttatttggcactagcccacatcgtgaaaccctgtctctactaaaaatacaaaaattagctgggatggtggcatgagcctgtaattccagatactcaggaggctgaggcaagagaatctcttgtacccaggaggtggaggttgcagtgagctgagattgcgccactgcactccagcctgggccact[224 bp omitted]ggcaggagaatggcgtgaacccaggaggcggagcttgcagtgagccgagatggcgccactgcactccagcctgggcaactaagcaagactccgtctccaaaaaaaaaaaaaaaaaaaaagtttggggggtgttacttatcttttcatgattgagttgcaagggctctttatatagtctagatacaagttcctcatcaggtatatgatttgcaactacagtatcttctcccattagtgggttgtcttttccctttcttaaaaagcttttttgagacatggtcttgctctgtcgcccaggctagagtgcagtggtacagtcgtaactcactgcagcctcaaactcctgggcttaagcaatcctcccacctcaaccttccaagtaactaggactacaggtttgcattaccacatctggctaattttttaatttttttgtagagcaagccccttgctatgttgtccaggctggtcatgaactcctgggctcaaatgatcctcctgcttcagcctcccaaagcgctaggatacaggtgtgtaccacctcgcctggcctctcttcactttcttgatagtgtctttcggagcacaaaagttttttagttctggccgggtgcagtggctcacgcctgtaatcccagtactttaggaggccaaggcaggaggatcacttgaggtcaggagttcaagaccagcctggccaacatggtgaaaccccatctccactaaaaatacaaaagttagccaggcgtggtggcatgtgcctgtaatcctggctgctcgggaggctgaggcaggagaacccaggagacagagattgcagtgagccaagatcgcgctactgcactccagtctaggtgacaaagtgagagtccatctcaaaaaaaaaaaaaaagttatttagttctgatgcaattcaattgatggattttttccttttgttactttgtgagcctgtttttgaaccacagctgacctcagagccctgaggcatctctccatgctgagaagcagttacaccttacgattatgagcatggaccctggagctggatggctagcattcaaatcccagtttacttacctgtggtcttggggaagttttatttatttattttttttgagacagagtttcactcttgttgtccaggctggagtgcaatggcacgatctcggctcaccgcaacctccacctcccaggttcaagcgattctcctgcctcagcctccctagtagctgggattacaggcatgtgccaccatgcccggctaattttgtatttttagtagagatggggt[136 bp omitted]cttcagtttcctcatctagaaaatggggataatgatgtctgcctcataggcttgctctgaggttcaaatatgtaaattcatgtaaagtacttacaacaacctccaaattgtataaacagtataattgatagaacacaaattatgaattcagtacatagatttagcactgtataaatgcatgctgtaattattgtggcacttgctataatatcgttattgttatagtattttccgttgttgttgtacaagtatcttctatagtattgttgctgtttatcttccaacttggaaggtgagtatgggccaggtggggtggctcaggcctgtaatcccagcacttgggaggttgaggagggaagatcgcttgaggccaggagtttgagaccagcctgggcaacatagtgaggcccctgtctctataata[140 bp omitted]ggtgaaaccccatctctacttaaattacaaaaacttagctaggcatggtggcccgtgcctgtaatcccagctacttgggaggctgaggcaggcgaatcacttgaacctgggaggcagaggttgcagtgagctgaggttgcggtgagctgagattgtgccgctgcactccagcctggcgacaaagcacgactccgtctcaaaaaaaaaaagaaaagaaaagaaaaaagttaaaaaaaaaattacccaggagtggtggtgtgcacctgtagtaatcccagctactcaggaggttgagacaggagaatcgcttaaacttgggacgcggagattgcagtaagccaggatcatgccactgcactccagcttgggcgacagagcgagactctgtctccaaaaaaaaaaaaaaaaaaaaaatgcgtatcgttccacctatttgacagatgaggccactaagccccaccagaaagcatgcttggccgatgagctcatccattcctgttgcccctgacgtttctgccggtttcttgtcccagcaggttgggggcgcctgccccccactaggccaagtggagggggtccctccgtccaatgggcctggccagggccctacgccgcctcagcggcgccctggattcgggagacagccgggcgggcgatgaagaggaggccgggcccgggttgtgccgcaacgggtgggcgccggcaccggtgcagtcacccgtgggccggcgccgcggtcgcttcgtcaagaaagacgggcactgcaacgtgcgtttcgtaaacctgggtggccagggcgcgcgctacctgagcgacctgttcaccacatgcgtggacgtgcgctggcgctggatgtgcctgctcttctcctgctccttcctcgcctcctggctgctcttcggcctggccttctggctcattgcctcgctgcacggcgacctggccgccccgccaccgcccgcgccctgcttctcacacgtggccagcttcctggccgccttcctcttcgcgctggagacgcagacgtccatcggctacggcgtgcgcagcgtcaccgaggagtgcccggccgctgtggccgccgtggtgctgcagtgcattgccggctgcgtgctcgacgccttcgtcgtgggtgctgtcatggccaagatggccaaacccaagaagcgcaacgagacgctggtcttcagcgagaacgccgtcgtggcgctgcgcgaccaccgcctctgcctcatgtggcgcgtcggcaacctgcgccgcagccacctggtcgaggcccacgtgcgtgcccagctgctgcaggtgcgcccgggaggagaggcggggacttccgtgagccctgggggattgtgggagatgtaggcccgagggcgaggggcgtgcggtcctggagggggcgtggactacaactcccagcagcctcttgggcctggggcctgcgaatgggtcactgggcagctggggatgtaaacccaacagaaaggtatgtgaccagctcttcctggaggcctggatttggggcatacagagcttcctgtggcttgaggattgcccgcctgtgggtagaccccaaaagggccacgcctggcctgtcaaggctctgggccgtaattcccagaagcctctgggtcaagggacctgtccaaagatggggtggcctcagatgcagctttgcgagggggtggtggagggcctgcgtgaccgttctattactcgggtgtacaattcccactggacactgtggcacagtcggaggcctgtgacttgaggcccccgggagaagcaggccctggaatgggtgcagctcatcgctgtggagcacagttctccaggcctctaggtgtggggtcctgcggcatctgtgggagaattcattccccacctcagtggcccattgtgtcccaccagcctcctaacctctgagagcagggtggaggtggcaacgaaacgaaactgcacctcccattggcccctggggtactggctccctccctgccctgaggaaggggccttagcgttcctagaattgtggtcaaattgctcaaacatctccgttcccaagaaactctgggccggcagctgccgtggcccaagtaaagtgactttaggactctgggctgaggctggacttggagaggatcgggggtggtgggagctgcaactcccagccgcctctggggttcctctacttggggcttccagagacacttacaagaggaggatagatgcccacctcccacttcaatctcctgcctgaagctttgagataccaggattcatgaataggagggacactggctcttgcagaagtcggtggggcagtgacttggcctgggaggtggctatggaaccagcgggtaggcgggggtgaaatacccacacccccacaaagcgtgctcacacacagaatgacatggaagggtttgcagttgccctgacagctaggatagctcaggggagagcccagggataagcctgaggcagtggtgggtgcagaatgttggacctaggttgccctaactcccccttcttgtcatctgatttatctttctctggccacatactaaaagccatttttctctcccgctccttctccaattctctgttgaatgtcatccttattttccgttgtcgctttgatttcatctctgtcttgctgatttctgtgtctctatgccaatatcactctgtccctctctcctcttcccccaccacgcccctcttcccgttttctacccccaaaccctgagtctctttcctctctctttatctctgggtctctgtcccatgtcccatgttttctctggacctccatcctcccctcctgggtctctggctcccttactgggtttctgtgccctcccctgcctctctgacttcctctctctctgggttgccggccccatctcttgatctgtgttctcacccttttcttcactcctgtggtctttgccttctttctctgcatctcttcctctctctcacttcgtctctgcccgtctctgtgctccctgctgtctttggctcctcgcctcctgctgcagccccgtgtgaccccagagggtgagtacatcccgctggaccaccaggatgtggatgtgggctttgatggaggcaccgatcgtatcttcctcgtgtcccccatcaccatcgtccatgagatcgactctgccagtcctctgtatgagctaggacgtgccgagctggccagggctgactttgagctggtggtcattctcgaggggatggttgaggccacagccatgaccacacagtgtcgctcgtcctacctccctggtgaactgctctggggccatcgttttgagccagttctcttccagcgtggctcccagtatgaggtcgactatcgccacttccatcgcacttatgaggtcccagggacaccggtctgcagtgctaaggagctggatgaacgggcagagcaggcttcccacagcctcaagtctagtttccccggctctctgactgcattttgttatgagaatgaacttgctctgagctgctgccaggaggaagatgaggacgatgagactgaggaagggaatggggtggaaacagaagatggggctgctagcccccgagttctcacaccaaccctggcgctgaccctgcctccatgatgcaaactgatgtccccttccccgtgtatgcccccttccccaaggtagcaagatggagggatggggctctctcctgggatgggggcaggtgttcctgaataccgacaggcctgctgggtaaatgactaggtggtaaggttctgccatgcctggtgacccaccatggacatactggaccttaattcctctgcttctgtgctccctcctgagaaccctttatgagcctgattcctcagtctcaccagaattctggatcacccaagaggaaaagactggcagttctagattcctctatatggggagacctggattgttgaccagggtgagaagccaatggtatagactgcctctggggaagcaagttggcagttcttgaacagcatcagatatcaagagtttgtaggtctggattcacctaagattcaagggagtgttgcttctcaactcagccaactgagtagcaaatcatttgttctagaccacctaaggagggaaggttatggaatgccccaagtattcaagatcatcttgattgaccaaagaccaaaaaaaaaaaaaagacctgtggttccagaaagctcattagttgagattctgtgagtctaggttgaccacagaggcaagcactggtgagtctaggacagattttacgtggagagttgaactactccagaaactaaagagtaatgtttctagaatgcacaaaacattgttagtctgtgggtttagaaagactgaagtgacagattaagagttcttgatattagataactccaacttctggctgtagagcacccagccaagagaataagcagtgctttgaaaggatccactgggtgggttgtttttttttaaagtgccattctagaatgtccaaagggaatcaggattctgtggctgtagactgatcacagagtcaaggaagcagtggcaattctagatatctgagattttgctggttccagtttgcccaatggagttgagaatctcaatgattctagatgacttcttgtggttctgtaatgccaaaaggaatgaaggctccagggatacagagttgtccattaccaaagcctggaagttctcatcacctccaggtggactgcttggcagtgctaggaggtggactcaggacttcagaagcaacatttctggcctgacctggaaggtgaaggtgaaggtgagaccctgtagggcacagggctaattagtggacaagggaagggggaggcccagggctggtgagtctagaatgctctggaaccctacacctagtgatgtgtgtctatttctttttctttttcttttttttttttttttgagactgagtctcgctctgccgcccaggctggagtgcaatggcgtgatctcagctcactgcaacctccgcctcccggcttcaagtgtttctcctgcctcagtctcctgagtcgctgggattacaggcatgagccactatgcctggctaatttttgtatttttagtagagacggggtttcgccatgttggcgaggttggtcttgaactcccgacctcagatgatccacctgcctcggtctcccaaagtgctgggattacgggtgtgagccaccatgcccagccgtgtgtctgtttcttaaagatattatacatatgtatattatatatatgtaatataaatacagatatctatctattttttcccttggtccctacaacaggcttagagatggagtgctagctaattggaatgaggtccttttcaaggaccccagaagctttgctctaaatcccaatgctgccccaacttactgtgtcactttggactcctcttcatgtcagtttccccatctgtaaaaacgggatattggaacttgaagttcttcaggggcctttccagcaggatgagtcctcactacaccaagggtgggatgggcattcgagtcctggggatttccctcctctccccagtgctggatcatacggccttccaggagacgctgggatgtaagatactcttggaggctggctctgaactcgggtgtctgaatcacagggcaagggtaggcgtgggctgtggctaacagccagagtcacttccctggcctagcttggggacctggggaggaggaggtagctctggacaccagggttcttcccattgtgggagagtgagtgttttagggggagacctgtcccccagattaaagaactgggagccctagcggatgtgtctgcgaatgtgtttctcgagcatgggtcctccgacctggccccctgcccatgctaccatctacctaagtgccccgcaggctgggagccaactgcagagggagccagtgacagtgaggaggacgtgttcccaccccgtgttctggaccgagggcagccactgtcattgccattcagccttcacaagtgctgcatcaacccaaatgccccctccagcttctccatctccctttatccctcagaatccccatgtaataaccggatgggattaattagctggctgctctctcagctcagggtgtctggggtaggtagggatgggggcaatggaaacgcagggttggggaaggatgttaagttggaagtgaaggggcagggagggggtttcgtttgaaaggagtatgggagcagggcagcccagcctgggtttccactggggagggcagggcctgggccactcataaaggtcagtgaggggattaggagcctccatgtctaatccgacagcttaactaggtcctggccctgaatccgtctccacctgcccagcccagggacagcaaatgaggacgaggcccagacaccacttcagcccccattacggcttccctctttacaggggtgcctgggttccctattccagccagtcccttgaccacattccgttacaaataatgggacatagaggctggggaaggggaaggggaaggggcctcagaggagggaggagtttaagaagggcaagggtggctgggcacggtggctcacgcctatgggcacggtggctcacgcctagcactttgggaggctgaggcgggtggatcacctgaggtcaggagtttgagaccagcctggccaacatggcgaaaccccgtctctactaaaaatacaaaaattagccgggcatggtggtgggcgcctataatcccagctccttgggaggctgaggtaggagtatcgcgtcaaccttgtgggtggaggttg[133 bp omitted]gaggaaaaaaggcctctgagatgggagaaggaatcagagaggtgggaggatgctgaggaaaggggagttgtcttagcaggaggatgcttggggaagggaggagtcttaggaggatgctaagctaaaggaaggagtttggagaaatgagggaggagtctgagcggcagaaggtgccaggaaggccgagcctgtgctttcactaaatttcaccttcccctgttccattccccatgaccgataccaaatagcatagcatttagaaaaaagtaaatcttggccaggcgcggtggctcacgcctgtaaccccagcactttggagggccaaggtgggcggatcatgaggtcaggagttcgagaccagcttggccaacatggtgaaacgcccgtctctattaaaaatacaaaaaatagccaggcatgcaccatcatggtgcaaccctgtaatcccagctactcgggaggctgaggcaggagaattgcttgaacccgggaggcggaggttgcagtgaaccgagatcgcgcaactgcactccagcttgggcgacagagcaagactctgtctcaaaaaaaaaaaaaaaagaaaaaacgaagaagtcttttgtttcaccactccacgactccgaagaggctgagggggatggggagggcatagatggtgataaagaaggagttcggcggtaagaaggggctgagaggaggggaaatacgcggagaagaaatgcaaaagaaaaggaggcctaaagccgctcccggttgcatggcaacctttgcggtcagaagccagcatggcctgctaggaggtgtggcttacggaaacaagccagttctagccccgcctcctagcaacaagactaacaaagtaccgccccctagcaacgtattatcggaggcggggctcggtttacctagactccaagtgtccagggcctttgagcaggcgcagaggtggctgtaccgcgtggctccgcctccgcgcgacacttttccggggcttctcattggagagcaagcctgtcaagtgctttctgttgtttcggaggcggggcctgctgccctgcctgcactccgattggccccgcgggccgtctacctctggccggacatacctacaccggctttttgtacgactgttggccctggagaacgatcctttggtggcgagggcggggaggacgaaagcgcccactgtggattggacagtgtcaaaaagaggggcggtccctactgaaggggcggttgggcgacgaagggaagagtcttttcagcgctgaggactggcgctgaggaggcggcggtggctcccggggcgtttgagcgggctcacccgagcccgcgggccaacgcggatccaggcccgactggcgggaccgccccggattccccgcgggccttcctagccgccatggaggacggcgtctatggtaggtcggggaggggcggggtcggctgggagttgctggagcgttttctcctgaacgttccgccgcgaacgtttccccctggcgcgcggcgcccagaagcgttcggctcagtcgtagacttgtcgcgccgcttttgttgggcgctggacgggcttccggcggggcccgaaagccgggcgttccaggccattgtttgggctgagcctgtttccggtggcggcgggaggggcgggatggagtggtggaggcgaggccggggcggaaccattcccgctggaggggcgggcgagcccagcgcctgccggggccggggaggggcgcttgggttgcggggaggggagaaatcttggggggcgggggccttcgatgtcccgccccaccttcccaactctcctgagctgtcatcagttcccccggctgtagtgacttttcatggacccagtagtccggataaccaggtccccagctacctcgccagtaatggagtcagaaaaccaaggcctcagtccccttccaagtaatggacctagaagccgaggcccccagccctttcttccctcagatctaagagctcaggcacccattccccttctccctcagactcaggaatccgggccccaattccccttgtcccccaggactcaagagtttagagccccagctctttctcctctgcagggaggaatccaggcccccagcccattcttctgtgcagacataggaagccccttacacatcctctcccagctctgtccgcccccagattgcaggaattcaggctcacggcccctagcactgacttttaaaccttgaccccgatccctagaacccccagacctgactccggaggagcggatggagctggagaacatccggcggcggaagcaggagctgctggtggagattcagcgcctgcgggaggagctcagtgaagccatgagcgaggtggaggggctggaggccaatgagggcaggtgagggctggggcggatgacctagggggcgtggggttggctgaggccagggatgcccaggcattgaccctccacccccaaccctgctctctgctcctgcagtaagaccttgcaacggaaccggaagatggcaatgggcaggaagaagttcaacatggaccccaagaaggtgcttggggccacaggactgggatcagctgggcaaacatccaggcaggggcttctggcacctccgggttccagaagcgtgatggtgccgggtctattctaggtggacagacttggtcctaatccctggattcagatactggctgtccatttgttttctgaacactgaacactgaccaagtgttccagccctcctgactgttttgtcccctgcctggaaggtcgtcttccactttctacttgtatgggcgcatttctggtcccaagatgagctcgagtcttgtaggggctgtggacaaagtgacatgcacaaaggagagttgacctctctcccacaaaggtgccgtgacggaggaaggtatcagggtagtggacctctggaggaggcaggctggtggagtcagggagggcttccttgaggaggagacattcaggtcgggtttgaaggatgagtaggtgttcaccaggtggaggaaaggcttttgttcacctactctttgtgtgtgtgtgtgagacagagtcttgctctatcacccaggctggagtgcagcgatgtgatctcggctcactaacctccgcctcctgcgattctcctgcctcagcctcccaagtagctgggcttacaggctcccaccaccatgcccagctaatttttgtatttttagtacagatggggtttcaccatgttggccaggctgcttccaaactcctgacgtcaggtgatccgcccgcctcagcctcccaaagtgttgggattacaggcatgagccaccgtgcctggcctgttcacatactcatttaacacccattttctgaggcctctcaagagtctgatcctgtgtagggcaatgctggggacccaaagaagaattagatgctgccttgtgctcagagagcccttggacaccgataccacagttcacagtgagataaagcagtagtagagaggtcttcgtagcacagagagtgagagaaacctccagtctagccagggcttcgagttcacagcccttgaaggactgcgtctgctaacaggttgtcacgttattctttcctgaagcaattggaattctgttcagtcattcaacaaacattgattggctgggttcggtggcttatgcctgtaatcccagtgctttgagaggccgaggagggaggattgcttgaagccaggaatttgagaccagcctgggcagcatagtgataactcatctctagaaaaaatataaataaataaattagccaggtgtgttggggcatgcctatagtcccagcttctgaggaggccgaagtgagaggatcccttgagcccagcagttcgaagctgcaatgagctgtgatcacgccactgcactccagtctgcaatagagcgagaccaggtctcagaaaaaagagaaaatgtactgagcacctgtgccttgccagaccctgttgttggtgctggaattaaccaggcaaaggcagagagggtaggccatgaagtgcaaaggccatgagttgggaagaatgctatttaagacctgtgagaaggctgaaaatgaaacctggccctggtctgttgagggtgggggtaggtctggatgctgaggttcccagggaggtgagtggggtggctttctggccctcagcactgagaccttgtccccacccaccaggggatccagttcttggtggagaatgaactgctgcagaacacacccgaggagatcgcccgcttcctgtacaagggcgaggggctgaacaagacagccatcggggactacctgggggagaggtacggtcaccactcagctcctgtggggcccctccctcccaccccccagacccagctcctgccctcacactggcagctcacaggtggaacagccctgcagcctccccgcagaggggccctggcagatcagccttctgactggactgtgacagaatggactgacatgggctaggggagcctgcggccaaccgagagcatctggggatgtggggccttctggaattacctggcagttgtggggaagcatccatttatgtctgagaagggtagagaacatctctcaaggatcatgggagcttgagaaccgtgggtagaccatggctgtgcataggcactgggtggccatctgggagctgtggggaccgctgggcccttgtgggagcttaggagttgtgggggtcatttggaagcctagggtgcacaggactggacatcagatgattggaggccatctgtggacgtctgggaatcagggatttatagagatctggggtgcttgggaagcatctctggatgtctgggggatgtgggggctgtgtctggatacctggggagcatggggatcatttgagagaggtgacagtaggtagcatacatgtttgcggcatttctcccaactgtacaaaggtctggcctaagcagggttcccaagccagatattcctcccaagagtgtgttctgagcatcccccaccctgggggcaggcctgtgtgggagtccagcaggaaacttcaccctcggcagtgggcagctgtggtgcagtagagggggcacgacttccccagggcattgccctttgcccattcctgccccatcctttccaaactgtatgtgtctttgtcccatccttccagggaagaactgaacctggcagtgctccatgcttttgtggatctgcatgagttcaccgacctcaatctggtgcaggccctcaggtgagtgagggggaggggtttggaacgccaggaatgtacctgtcagggccttcctagttacaagtgacaaaccttactcaagaaaaaaacagaaacaagcaaaacagaaacaaaaactagggaactgagtgtgtcctgcaccataaaagttcagggttatggcctccttcaggtatggctatatccaggagctcaaatggtggtcagaaagtcgactttctttgcctcttgtatttgccactgtgtcagcattgctctctgcagacccgcttacctgataacaagcctcaaccaacccccagacctgtctagcgaacttagcagaaagaggctatttctgtagggattcacaacactcccgtggccaatgcccattggtgagactggatcatgtgaccatacctgaaacaactgctgaggccggaaggtcgggattcctcgtggaccagttcctaacacagggactgagagtggggacaggctcccaccagccctggcatccattcctggcccctccccaacccaggcagtttctatggagctttcgcctacccggagaggcccagaaaattgaccggatgatggaggccttcgcccagcgatactgcctgtgcaaccctggggttttccagtccacaggtgcgggccccaaatcctgggtcctgggaaagaggagactggggcccagactcctaggtctgagggagggagggggctgggagctgggaatcctgggtcctggggaatgggggcactggggactgacatgcctgggtcgtcaccacctgccctgtccggtgcagacacgtgctatgtgctgtccttcgccgtcatcatgctcaacaccagtctccacaatcccaatgtccgggacaagccgggcctggagcgctttgtggccatgaaccggggcatcaacgagggcggggacctgcctgaggagctgctcagggtcagtcccccttccctgcccctcagccctgcccctcttcctgccacagacacccccgccccacctgtggtctcctagtgcccaagctgtctgccctcacccccaagatggtgcgatcatgccaactcgtgtgtgatctttttctctctctctgggtgcttctcttcttgactgtctctctcaggctttggccctgacaattttggcctgtctgtcttctctgtctctggctgttgggctttccggccctcgattggcctcattccccatctgtctgtttctctgaggacgtagccggctcctccacctatcaccagggcatctcttctttcctccgccacctcagcctccctccacttctctgcctttcacttccctctcctccccactacccctctctcttccccactatgagtcatcccatccctggtctcgctgccccccaccctgagtaaccctggggggccccagggggctcgaatggctaatgcagcctttactcctcagaacctgtacgacagcatccgaaatgagcccttcaagattcctgaggatgacgggaatgacctgacccacaccttcttcaacccggaccgggagggctggctcctgaagctgggtacgtgccctcccgaccccgctggtccctccgcaggaggacatttgtgggcctgggccctggactcagcttccgcacacacctgctgcctgaactgaggcaaatgattcgacctctctgaacctcagttttccacacccaaaaaatggggctgaaaataaaatcaggcctgtgtgctgggcctggcctgtagtaagtacttcccaaccccttctcttgacccacaaatgttgatggagcccttctgtgccaggccctgagctgggctgaggaggcagtgagaggcagctgacattgtcctttcgtgggagaagagttcactcaggcttctttccactgcgttaacccagcccgagggagccaaacccctggaatctattccccttggcaagaactcccagggttccaggcaggactgaccccgcactccgaggcatcaggcccagagcacttggctgatccaggtgccatccttcccgaaacaccacccacaggcagaaaagagccaaacaggccaggaaacctgtcccagattctggcttccagctgtggagggaatagccagggctggtgcagatgagtcgggaaacccagcagagatggaggggggagtcttcgtcataacacgtggcactggcacattcaaggtcggttagcatggatcagacaggatcgtagcatgatgaggggttagcacaaggactagagtggttctcagccctggctgtacatgagatttgcctgggcaactcgaaaactccggtggctgggccatagactcctgaagtcaggctctcaggagcagaagggccatcagtcatcgtttaagctcctcgggtgctcccaatgcatagtcaaggttgagagctactggcctggagccgtgcctggtaacagtaggtgccacctgcgtgttagatgtggtttataatggagacacggtgcacagctgctccagagagacacatctgggcagttacagtccagcacagcagtggaggcttcccgcggcagcaggagagcccacaggaagctttcagctcagtgaagggagtcaaggtcaggcttcttggaaggaggttggacagggcagctttggcctctgagtcttgggggcctccccatgtggaactgtgctcttaaaccagggcatcaccacctcaacagatgccagggtttcctggtaaatgtaaaatacacaagtcaggcagggcacaggggcccacccctgtaatttcagcactttgggaggacaaggcaggaggattgttagaggtcaggagtttgagaccaacctgggcaatataatgataccccccatctctacaaaaaataaaaaaattagccaggcatggtgatgtgggaggattgtttgagctcaagtggtcgaggcttcagtgagtcatggttgcgccactgcagtccagcctgggcaacagagcgagaccccgtctctataaaataaaacatgcaaatcactgtccagccaacaccccagtccagatccctgcattcgatccaagggaggcagactgctgggggaaattgagagtcctcgaggtgcccctggcagtgagcgggccagaaagagaagcaggaaggcgccagcatcacgaggaactgcttccctcaaaactgctgtcaggccaggcacggtggctcaggcctgtaatcccagcactttgggaggctg[134 bp omitted]gaggcacaagaattgcttgaacccaggaggtggagcttgcagtgagccgagatcacaccattgcaaatccagcctggacgacagagcgagacagtctcaaaaaaacaaaacaaaacaaaaactgctcctgtgagcagtaactttcccatttcccagaggctcacgcctcagtttggttctgagccccacctaaggctgcccagccccagggacatctctgaccaaagggcctctgttccctttgtgccagttagagggaccccttccttaaaagatggaaatacaggagtggagattggtgatggtggttgctactccatgcctaataaaagccattcttactgtcattgtttaaccctgggcccacaaggaagccagcagcaggtcattttgccacaggaaggtgtaggcccgagtgagtctccaggctggagtccagagagtccaagagagtgccctgaggtcacacagccagtttgtgcaggagctgagatgggccctcacacccacctcagaccaagggctgggggttttgccttctgtcctgtgggggcctcctccagggcagaggcacttttaccatgtcaagggaggatgctcctggcctaggacagaccctagggggtaggctggggccctgtaccgaagcaaggggttttcaaggctgccacccggggctcatggcccttggcctctctgggagggaggagccccggccatccccaccctcgtggatgtaactggttttcttccctctctctccctcccctcctctctgcgtctttccctctctcctgtgtttgcctctctgtcctgcccctgcgcacccctccctgtgcccaccctgtttctgtcgcctgcggctcttgggggtgctccattctcccgccttcccttctcctgcacctggtcctgcctgctttctcgctgtctgccccaggaggtaggtacacgacctgtctttgtctcccatcactagacgaggggagggggctgccctggcgccctggcgccctggcctcctgcccacaggaggagggggctgggggctcaggctcctgggctgggactgacagactcagaaaatgtggagccccaagctgggggtggacgattcctggagccccaacatgcctggccctgcttgtctgtctcccccaacgcagcggctttgtctaggccccaggagccccacctctaccgctcttgctctgcttctcacgcccctcccatctcccagaggccctgtccccctgttgagcccaggccccctcccaccccttccctttcagggggccgggtgaagacgtggaagcggcgctggtttatcctcacagacaactgcctctactactttgagtacaccacggtgagcgtgacccgacccgggctctggggtcctgggcggagtggctgggagcctggactcctggggctgagggaggtggggtggggtgaggacttggaagtctgagttctgtccaccttgcttcttcaggacaaggagccccgaggaatcatccccctggagaatctgagcatccgagaggtggacgacccccggaaaccggtaagaccctctctgtacaccttcctgccagggcggggcctcctctgcccagggctggttcttacctgcgcccttcctctctcgtccccagaactgctttgaactttacatccccaacaacaaggggcagctcatcaaagcctgcaaaactgaggcggacggccgagtggtggagggaaaccacatggtgtaccggatctcggcccccacgcaggaggagaaggacgagtggatcaagtccatccagtgagcctggactcctgggcctgatggaggaggggctggggcctggactcctgggtctgatggaggaggggcaggggcctggatgcctgggtctgatggaggaggggctggggcctggacgcctgggtctgacggaggaggggctggggcctggactcctgggtctgacggaggaggggcaggggcctggacacctgggtctgacggaggaggggccgggggcctggacccctgggtctgacggaggaggggccgggggcctggactcctgggtctgacggaggaggggccgggggcctggactcctgggtgtgagggaggaggggccgggggcctggactcctgggtctgagggaggaggggccgggggcctggactgctgggtctgagggaggaggggccgggggcctggactcctgggtctgagggaggaggggccgggggtctgagactcctcctgggtatgagggaggaggggctggaggcctggactccttggccctcatcctgggacccctccccttctgcagggcggctgtgagtgtggaccccttctatgagatgctggcagcgagaaagaagcggatttcagtcaagaagaagcaggagcagccctgaccccctgcccccaactccattatttattacggagctgccccgcctgggtggccggacccctgggccttggggctgtggatcctggttccctgtttggaaaattcaccacctctagctcctcactgttctttgtaattaacacgctgttggtaatcttattaattatttaaccacttggcctgctgaccccctcatttcttggggttgacagagtcgaggtgctccgtggagccagcctgtttccctggacaggggcctggacccgcctgtctctgggtgctgcctgggctgtcccggtgggtctgttctggtttcaccccgagcccagcaggagtggagtaaagggagaaggttaatatggtgggagtctggagttggaattggccggggacagagtttagaatgcagggattcagggtcaaggtctagcattcattctagaagttacttgacagccatcagccagttacgctacagccatcagctagttcccatcgttgctttcatggggcttgaggtctttgaggggcaggagatgaagctggtgaggttgtgagctgggccagggctttgaggacaacctggagctggaagaacatgcgaccacctcagggagggtcagggaaggatgagtggggaggtggcccatgtcctgcaagggccttgctgatgggatgtcctgaagggctgggcagccttagatcgggctaagagggcaggactgtgggccagtgccagagccaggcttgtctgttctcaaaggatcagcctcctttggaggacattttgtgtcaaggatagggctgaggacctgcgttctgaacgtctttcctgggattcttgacagccaaagaaattcgaggatcgcctctatgaaggtgaagtcttggcatgtggggtacccctgaatcctgggctaaggtctgtgaccttttgccctccagttggggtatgtgtggtgtccccaaagaacaagggctcgtggatcccgagcagggtgcgatggcggattgggaggtcccatgtcactctcccatgcccgcctttgaagctgaggcgctctttagttaacaaactacaagtcccagcagggaccgggacgcgggtgggagaggcgcctgtggccccgaggcgtgccgcgagttgtagtccctcctgcccgctgtgttcgcttttgagctctccgatgggatgcggcgcttcggaatttcgggctttgatccctgtcccgcccttggccacaggcacctgccggcctgaaggcccccgcggtgggggtaccctgcgcccctccgcgggaaggtggactacagttatcggcaggctgtgcggcgccaaagccacggtgacccagacccgaggtttttccgggcgtcgcagtttcccgagactccgtggcggcgtttgtcttctttttcttagtcagatcccgtacttttgtggagggtagaggaggctttgaccgccgcggccccgggggctggtgggaaatggagttccaaatgagaaaatagaattccccacttctctttcccacaggtgccagggaaacggagtcatcgacccaagaaggtcgtgggagatgaggtcccagggtaaacagcgggtcccgccactatgtcaccctttcctgccgcctccccggatgaactgcatgcagggcggccggctccgtggcaggcagaggcaggaagaggcgcggagcccgctggtggcgaagaggggagtgcggcgggaggggagggcagaggcaggcggccggtcgcgtggggcctgggccgccccaggagggcctctggctggattcttagcagatggaagccgtgcaagggcaggaggcaggggcctgacgtgtttggattgaggttgcaggaggggcccctggctgcttcagggagaataatttggaggcgagcggggaggtgagaggaagctgtgcggtgcaggatggcgtggctgtggaggtggagaacgttgggccacgctaggagtcttgaaagaggagccaaaaggacttgctgagagccgccgcagctggtgaatgacggtgccatgactgaggtggtcgaaagggagtatttaaggggaaatcaggcattccgttttgaccaaattaagctggagatgcctgtggaacattccagccaggctgcatcacgtcacactgaccttcagcattgcccacagtccatcttcccccaggacctgaggattttgcgtccggctccctcctcgcccaggacccccaagctcccagcacgcttctgattttttttgtaggtttttttttttgttttttgttttgttttgttttgtttttgagagggagtctcactttgtgccctagactggagtgcaatggcgccatctcggcttactgcaacctccacctcccaggtgcaagcgattcccctgcctc[134 bp omitted]cagcctcccaaagtgctgggattacaggtgtgagccaccgcgccaggcctcagcccacttcttttgggtggcaatggtttggatatcgtttgtcctcactaaaattcatgttgagattcgagccccagtgtggcaggtgttgggatgtggggcctcataaggagctgtgtggtcttggaggtggagtcctcatggatagattaatgcctgccttaaggggtgagtgagtgctcacccttgggaatttgggaatttggttttctctcccttgcttccttcagcaccatgtgatctctgtgcacacagctgcatccttctgccctcccccagaagcagcagcagcctcagggatgagggaggtcctcagtgagtgcacctgcccagtcttgaaccttccagccatcagaatctgagccaaatcaacctcttcctttataaagacccagcctcaggtcttctgtcagagcaacacaaaatggactcagcacggatcaaattgtgtctcccccacccccacaaaaaactttatattaaaatcctaacccccagcatctcagaatgtgatctgattaggaaataaggtcattgcagatataattagttcagatgaggtcattcatgtgggccctaatccaataggatgtgtgtcttataaaagtttgtacagagacccagacacacagaaatgacaccatgtggaggtgaaggcagagattggggtgacgcctctacaaaccgaggaaaaccaaagctgccggcacaccctcagaagccagagaccggggactcatcctccctcacagcctcaggagcagccagggctgacaccctcatctcagacttctgacctccagcactgggagaccttcagtttttgtgatttaagccactaattttgaggtactttgttatgtcagccctagataactaaccactcctccctcagacccaggagtccaggcccagccccttcttccctcagacccaggagttggggaccccggcccctcctccctcagacccagaagtccaggccccagcccttcctccctcagacccaggagtccaggcccccatcccctcctccctcagacccaggagtccaggcccccatctcctcctccctgagacccaggagtccagacccccatcccctcctccctcagacccaggagtccaggcccccatcccctcctccctcagacccaggagtccaggcccccatctcctcctccttgagacccaggagtccagacccccatcccctcctccctcagacccgggagtccaggcccccatcccctcctccctcagacccgggagtccaggcccccatcccctcctccctcagacccgggagtccaggcccccagcccctcctccctcagacccgggagtccaggcccccagcccctcctccctcagacccgggagtccaggcccccagcccctcctccctcagacccgggagtccaggcccccagcccctcctccctcagacccgggagtccaggcccccagcccctcctccctcagacccgggagtccaggcttcagcccctcctccctcacacccgggagtccaggcccccagcccctcctccctgagacccaggagtccaggcccccagcccctcctccctcagacccaggagtctaggccctggtctttcctccctaaggcccaggagtccaggcccccagcccctcctccctcagatccaggagttcaggcccagccccctcctccctcagacccagaagtcctgcccccagtcaccagcccttcctccctcagacccagaaagtccagctctcaccttccccccgctgccttggttcatgcagcacccacccaccctgtggcaggtgtctcaggatcacttcaagcaccaccaagtctcccagcaggacttattgggaagaagctaaaaccttatcctctctctccctttccccaatcccccaggactcacatgtgaccctaatgccgccatcaccttaactccgaggccagagtctacactacagcctccctaacagagggaaggggctgggttcccaccccttgctccttccctctccccgcatccagactacatcccgcaaatacaccagtgaacctggtaccaaggtgatgggggacaggtcaaggccaagagatcagagccacaaagacaaacccggtcagagggaaaaagacagagtcaaaacagaatccgggagaaaccgagaacaagaaatagagacagcctggcgtggtggctcacgcctgtaatcccaacactttgggaggccaaggcaggcagatcacttgaggtcatgagttcgagatcagcctggccaacatggtgtaaccccgtctctactaaaaatataaaaattacctgggcctggaggcaggcacctgtcattccagctacttgggaggctgaggcaggagaatcacttgaacccaggaggactgcagtgagccaagatcgccccactgcactccagcctgggtaacagactgagactccgtctcataaaaaaaaggaaatagagacaaaagcacaaggcagaaggacataatcgagacaggaggaggtgacagggagacacagacaaggagaaaaatgtggaggcagggaggaactcgagacaaaaacatcgaaatagaattagacagggaggaggaggccaagagcaagagactcagatggggagacaggaaaactccagatcagttggagaccaaaactggggcagggtgagacagggagccagaatgttggaaatgagagagagccacacagataggtgcggttagggtaaagacaagggatgagaatgtcagcgaggtgggcggtcgcatggaaaaacaggtaaactgaggcagcaccacgctgggtggggaggtagaccctgaacttcaaggaacaggcagtgccgacctgaggtgggtgggatgtgatcgtgatccagtgtgggcatgagcagctcatttctgagcccctgccccactagcccctggccctgggatagcgtctggccaccaccgcgggccaccttgcagaaacgtggctctgaccgcagcctgcaccttcccacccaaccccagtgggctccttatggttttttgtttgtttgttttttgttttttttttttgagatggagtctcactctgtcgcccaggctggaatgcagtggcacgatcttggctcactgcaacctccgtctcctgggttcgagcgattctcttgcttcatccttatggcctcttgagccagcagtgctgctgctgcagcggccaaggttgggcgatgcaaaccccaggcgcagagccgggatctggagaagcagagaagccgggcctccgccactgtgcgggagtttccgcttctctgagcatccgatgtcccatctgccatgcgggccaggctgtgaggatgggacttctcagggtcgcactcgctccctgcatcctcccctcctcacctcgcgaaatacgcacaggccccgtgttcctccaaaaagttgtttttgtcttttttaaataatgtgaaaatgccacgcgaaggtttgaaccagaggcccctccaggggccgggctggggagggaaaggggagacgcgaaatggggggtccgggtccccgaagcctgcggcccctgtcttgggccaggagtgggtgaggagggacctccgctgtgtcgaggggctccaggcccaaaagagttcagttcagttccgagaaaggcggctctctatggaggggcggggggattcctgcctcatttggctccgagggggtcaggggggtcaggggagccatctggggggctggggggcgggggcccggggcctcccgtttggcacatggtaggggagtgggagggggagggcccagcctcgggggcctccccagaggcggcgtctgcggtggtggcagtggcgccgtcatccacagaggattccattctcaacccctcttctgagggtgcagcggggtcgggtcttcggggaatcaattctccacggggcctgaggatggacagaggagacagagaaatgaaattactagggggacagcctcatggcttctaggtcactcagcggaaaagcaaagccctcacccaccatggcccaaaagatctgctctgttccctctctgtcctcacctacccctcttctcccctctgctccagccactgggcctcctgctgttcctccagtgctcccagcacggtccgacccctgggtctttgcacatgctgttcccgctgcc[367 bp omitted]cgtcccctccacagagtccttccccaaccatactgaatcaagcagtcacccctgcacgctcatctttctcactcatttccctctgactggtttgcatttgtcactctgggatgaccctgtccttggttttgttgttgttgttgctgctttgttttgagatggagtcttgctctgttgcccagactggagtgcagtggcatgatctcagctcactgcaaactctgcctcctgggttcacgccattctcctgcctcagcttcccgagtagctgggactacaggtgcccacgactacgcccggctaattttttgtagttttagtagagacgggtttttactgtgttagccaggatggtctcaatctcccaacctcgtgatccacccacctcagcctcccaaagtgctaggattacaggcgtgagccactgagcccggccgaacctgtccttgtttgttttttgggggggttttgcttgtttgttttgagatggagtctcactctgttgcccaggctggcatgcagtggcgcaatcttgacttgctgaaaccttcgcctcctggattcaagcaattctcctgcttcagcttcctgagtagctgggattgcaggtgcctgccaccacacccggctatttttttttttttttttttttaagacagagtcttattctgtcgcccaggctggagtacagtggcacgatcttggctcaatgcaacctccacctcccaggttcaagcaattctcctgcctcagcctcccaagtagctgagattacagaggtgtgccaccacacccagctaatttttgtatttttaggagagatggggtttcaccatattggccaagctggtctcgaactcctgaccttgtgatccacctgcctcggcctcccaaagtactgggattacaagtgtgagccacgcgcccagcccacctggctaatttttgtatttttcatacagacggggtttcaccatgttggccggctggtctcgaactcctgacctcaaatgatctgcccgccttggtctcacaaagtgctggaattacaggtgtgagccaccatgcctggcctaccctgtccttgtggaaaagcttcctgtctgcttgttcctataaaatgtaagctcaatgatgacaggagctgcggtcactgctgtgtccccagcatcccgtctggcacaaagcacaccttttccctgtggaaagagctctccccaggaactccgaccaaactttcctatgactctagctctgacttccctgggcgagcagaatgaaagccccatccattgtacagaccagaaagctaaggtccaggaggtgcaggttctcgttgggggcctcatatcaggctccctcatgctccaccctgtactttgtacctgggaggcctgggtcaagtcactgccctcactcccagtccctgagcttgagtttcgctcttttaatgggaagcatgaccttcatgcttcatggagactttggggtatgtggcatctcttggtacccagtaaatgtttgctaagtggacagagccacattgagcagggcagaggagaggacccgcctcaggcccccacaccatggtcttgggagccagacaggctcagcagctcgcagcccacgctgccgcaggaatatttgtcaactgagcgaaaggatttggggtttggcacaattgcaccctccgtctcctctcctggtgattaaaggtgaagccattctcgcttgccagccctgccagctcagccctgactcaccacttggcagtgtccccataccctggaatgcacccccaccctgtcctcacagaggccctgcgatgatggcctaagggagaaagtgacattcagagtgaagcctgaggatgcagccaagtgaaggaagagtcagcccccagacctgtcccacctgcccttgactctctgccctgtccaacctctccattcccacagccctggctcactatcctctcctcagcctttccccagcctcccagctcccactcttgcccttctgcccccaagagaccccagagcagtcttcctacacccaacattgacttccctcccttgcttatagtcgtccgtggctccctggcacccccaggacaaagtcccagctcctcagtgcaccccctgccatctctcctcagccctccatgcactctaagtaaccctgaagccacaccagtgtccttctgttccttgagcgggccaagctctctcctgcctcaggccctgtgtgcaagctgtcccctctgccagcacgccatccccttccccttcacctagttaatgacaaccaacccttccagttcccagttaaattacacttttttttttttttttttgagatggagttttgctcttgttgcccaggctggagtgcaatggcttgatctcggctcaccgcaacctccacctcccaggtttaagcgattctcctgcctcaccctcccaagtagctgggattacaggcatgcgccaccatacccaactaattttgtacttttagtagagacagggtttctccatgttggtcaggctggtcttgaactcctgacctcaggtgatctgcctgccttggcctcccaaagtgctgggcttacaggcgtaagccactgtgcctggccttaaatgacacttctaaggggaaaacaaagccctttcctcttgtcatctgctttctctgcaagcctgagtttgcagttcttcatttgtcatagcagtgtgtggtcagtgtctgcggggagggccaggcaggctcacccgtcttgctccacattgaatcccctgtgcccagcatggcgcctgcacgcagaagatgatcagaaaacattgacttaattaagtgcagtaatagctaataataataataatagctaatggggccgggcatggtggctcatgcctgtaatcccagctgggaggcca[133 bp omitted]tgaggcaggagaatcgcttgaacccgggaggtggaggttgcaatgagccgagatcacaccattgcacttcggcttgggcgacgagcaaaactccgtctcaaaaatactaactaactaaataataataatagctaatggttagagactgctgctgcacaggcgctgtgctgcatactcgggaggattaagccatttaattccctcagcaatctcatgagttagatcctgttatcattcccactctacagatgagggaactgaagcacagagagggaaagcgacttgccccaggtcacacagctaagaaatggcagggacaatatctggactcaggcaagattggggaagtaggagtgaaaccctccagtggcgtcttctaccttagctctgataccggggagcaccacctgtcctgccgagctgggcacaagccctgggtcctgggggtgttccctggctcggcagcagagggcagcagagagcccagtcccgttccagtcctgcgctgggacctgcccgtgtgccctgctctcccagagtggccttagcatcgctaaaagttggaaactaggggcggcatgacccctctcccaaggtggccacgaggattagcgatatggcgcatgtgaaacgccaggaaagaaacctgaccaatgttcactactggagagggcacagactcagaggccgcgcaactgtgggtttgaatcccagctcctcacttctct[143 bp omitted]tgaaaccctgtctgtagtaaaaatacaaaaaaagtagctgggcgtggtggtgcactcctgtgaacccagctacttgggcggctgagacacgagaatcgtttgaacccaggaggcagaggttgcactgagcgtagattccaccactccctccagcctgggcgacagagcgagactccgtctcaaaaaaaaaaaaaaaaaaaaaaaaatgaggacgaggctagaatccaccccatgggatcgcaatgaacattaaatgggttaaactgtggtgaggcactgcagggtccacgcgagagcagcggtgccgctgtgactgctctctaacccccagctgtgtcctccctgctctggttcacaccaaccggctttgagcactctgggtttctctctccttgtctgcccctgagcaccgtgttccccaaacggaggtgggatcaggatccggcaagtgccaggccggagtctgagcccagagatgggacaaagatgggcaagagtcgggggtgggggtaatccccacagaaggtaaaactgaggctcgggggttggggacggccggcctgcctgcctacgaccgtctgatggacgtcgcctggtctgagctggttccagagctgggtggggtgtctgttgactgagaggggagagagaagagactgggaagagagaggcagggacattgaaagatggtcacaagaagttggcagtggaacatagggggacagagatgggcagaggagggggcagggccgaggatatggtacctgcgggccgggcgtcgggggcccgggcgggtggccccggggtctccagcgcaggcgagacggagaagcgggagaagcacagcggggggcctggaggggggaggagggggaaatcctccgcccactcgaaactgcctcctgcggcagaaggaaagaccgcggtcaggctgcagacacctgcggcactcccgccctctggtcccgcccctcccgaccaagcccctcccaccccatagaccccgccccgtccgccccatggctcccgccccctcccgccccatagggcccgtcctcaccaaagccgctgtcgttgctgggaaacccatctccgggggtggcggggtggggaggtgtcgggggcgctggaggcgttgacgggtccgtgtccccctcggggggggcctggacgctcagctcgttggttggcgtctcctgtgaaggcagattagggggaagccagaggggacaaaccttcacgtcccatttaccgcatcccccaaaagcaacaaaaccggctaatatttctggggctctaggaatcccaatttgtaatcactgactcgcacgctctggagaggtggctggagcccctaatctggcttcgaagccttgggccagccttaacctcaacctggccagaggctcctttcctgacagcggagccccgcgcacagctaagtagcccaacgcagggattctctcctggctcattaacgtgaggcctccaccggatcccctaacccaaagcgatctccataagccccaccccgtccacgtcagtcccacccacctctgagatcttgacctgctccagtggccctcccaacccctgccccatcctgagcgcatgccgtgctggatgctgtgaccctgcccctgagccctccctcagaagtagacctgctcccgccctccaagtcccacccctctgaaaacatttcagtggcccaggccccagttcttggccttgtttccattcctttcataatctcagcccagtatgcccgccccaggttcatctagacaaggtcccagttcctcagcaccactcgccctccctttttctcttcaacaccatatcctgtgtttttctttttgttttagacagagtctcactgtcgcccaggctggagagcagtgttgtgatcatggctcaatgcagcctcaacctcctgggctcaagcgatcctcccacctgagcctcctaagtagctgggactacagatgcgcaccaccacaccaagataatttttttctttttaagagacgaggt[146 bp omitted]ccgtcccagtcgttaggttcgctcatccctgacctcaccccagaatacgttaagactgcctgctccatctctgaagcccacctgcagcctagccatggcccttccctagtgggtaagatctgctccaacccgaaccagcctacagacactagaactctagtcaacaaaccatgcccaaactctcactaggccccttcaccatccaggcctcttctcaacacttcctccctagcctctccaggatcccatacttgactacccagtaccccctctttccttccagacccacactctctctccagacctctcctcgccctctagaccacgcccccgtcacaagccctgccctcaccctaggtcccgccccagctctaggctcggcccatactcctggccctgccccattgccaggccctgccctcacactcaaagcctcctcccatcttcctagtcccgccccatttccctgaccagtctctccccagaccccgccttcacccctcaggcccttcccgcgccctgctccatccgccccgccctaggctccgcccccattccagccttggattttctccaggcctcctcttgccgcgccacagacttggcctccctcaggcccggatccagactctgtcccgatcctaggcgcggtctccttccaggccccgcccccgctctaggctcagcctgccttcaaaccctgctgtagaccccgccccaccctaagctcagccttcgtctaggccccgccccaggccctgcacctctaggctcgacctccctccaggccccgccctgggctccgccccccagcccgccctctccctgggccccgccccactctagctcggccccgccccaggccccgccccactctagattggggctccccttaggtcccaccccaattcagcttgccctccctccaggccccgcatcactccagctcggcctcccttcaggccacgccccactctaactcggcctccctccaggccccgccccaccctagctcggcctcccttcaggccccgccccactccagctccgcctccctccaggccccgcccaactctaagctcggcctcccgccaggcccttcccggctctaggctcctgctccctccaggccgcgaccccgaaaccgcgccctctcgggttccgcacctggtcgaagaggtagacggtcacgtccccgtggaaggagaccatcttgcgcttcctctccagctcgctgtcctctggctcgtcggccccgcgcggagacttgagcagcccccgcagcgggcgggccgcgtccgcgtcggcgctgctcaccacgacgggcaccggggctgctcgcgccctcccggggccccgcggccccgccgccgcgcccggcgccgccgcctcctcgtcctcctcctcgtcctcgtcctcgtcctccccgtcctcctccgccggccccggcgctcccgccccgccggcctccccgccagccgccccggcgtccgcgccctcccacgggggccgccgcgggcccggccccgggaatggcgtgagcgtgagcggcggcagcgccagcgagagccgggagagcctggctgcgaggggagagacctggtgagcccctgtcccggtgaaactgaggcaggccctcccacctagctgtgtggcctcagataagacccccgcacaatctgggcctcagcacccactttgtgaacggaagggctgcaccagggcttctccaggcagggtgggaaaggtcctctccagtgctcaacctccccagagctccccagtgccaacggctttaagccgcaacttcccacagcccaccaggccctcatgccctggcctacctgatttctctggcctctgtccccacctcctctggcctgacctccatctagccacatgggccaccccaccattcct[135 bp omitted]gcctcccaaagtgctgggattacaggcatgagccaccacacccggccagatccacctctctgagcctctgtttcctcactggcaaatgaacaagggtcacttagccctccattactgcataagtgaactgccctttctgagctgatggcaggggcaagaggagggtggaggtggggcagggagaaagatgaatgcagacggtccctctcaggtcctcgttctctctactcaagttttactaccttttgctattctctaaacatggtgagccagtgcacatctcagtgccctctctagaacactctcccaccgatgtccacctgcctcactccctcctttccttcacatctgctcaaaagtcacacttttgttgaccagacatctcagggtgatggggttatgggcgatgcttcatagagggagtgttttttttgtttttttttttgaaatgaagtcttgctctcgtcgcccaggctggagtgcagtggtacgatctcggcgcattgcaacctccgcctcctgagttcaagcgattctcctgcctcagcctcccgagtagctgggattacaggtgcctgcccccacgctcagctaatttttgtatttttagtagagacagggtttca[131 bp omitted]cccagatgaaggtcaggttgacaacctttaaaaattagggaaggcttcctggaaaggggaaatttggggtcttgaaggatgagtagttcacttgggaaaaagcgggccattctctgcctcttttcaccccccaatcctaatccaacccagatcctctgacgcatcttagctgctcatctcccaacattttcatgcagcctgggctgtttcctgatacagctgttcacaaactccctacaacaatctcaaggaagtgacagtgttcgaacaccacaggctatgaggaagaaacgtcctctgtccagcccacttcctgacccttgcccactgagccacaggctcctctatggagatgataactgtttcctcaagtgtggctgtgaggttgccaatataaaacaggacccagccacttataactttcatacccgtatttaaagaagttgcgcctcccagagattctgctggaactgtatttcctatgtccacatctaaacaagggctatttatttttacccttcatttatcttaaagagttttctctgtggcaaaatacttcctgcattcctaccaaaacttaattttcagaaaggcatatctgtgccttccagctcactagtcctatggtggtggagttgtcagggcaagatctgaagctccctgggtcccagccttgggcagctcagggcctcgaacacaggaggcctggcacactggatagatgccttagcttactggaaagttgttgtttgtttgtttctgtttgttttgttttgttttgttttgtttgagacagagtcttgctctgtcacccaggctggagtgcagtgacgtgatctcggctcactgcaatctctgactcacaggatcaagtgattcttgtgcctcagcctcccaagtagctaggactacaggtgcatgccaccacgctggctaattttttctttttttctttttcttttctttttttttttttctgagacagagtctcgctttatcgcccaggctggagtgcagtggcacaatctcggctcggtgcaaactccgcctcctggcttcaaacgattctcctgcctcagccttccgagtagctgggattataggcgcctaccataaagcctggctaatttttgtatttttaatagagacagggttttg[132 bp omitted]agtagagatggggtttcgccatgttggccaggctggtctcaaactcctgacctcaagtgatcctcctgcctcagcctcccaaagtgctgggatcacaggcatgagccacagagcccagccagcttattaagtttaaatcagcacacgctggcagcctggggcccttgagccatccacagacaggcttcctttgaactggctgcaaccataaaaacaaaagaaataaaaaccagagctctagtttaaaagggaaaagtagcagattcgccaacaccaggtgcacattcctgagaagtggctgccccttctacacagggcattttcttctgaagccccactctgcctccctagcatgcttcatccgtttccctatgtcgtctggcccctgtgggcatgagtttgagacccctggtctaagtgagttgcaataataaaagcaggtgcttactgaatcccttgctctgattaagtgccttggatgtcctaattcatttaaccttcacagcaaccctatgacgtaggttctatccctgccatccgtttttggcagatgggtaaactgaggcaccgtgcagcaaggacatttgcccaaggccaaagagctagagagggggctgagccacgatgtgagcccaggtggtgcaggcttcaggacctgcattcatcactgccagcccgacccgacatgtttacccacactcaccctccgcacgcctcggaaacagccggacctcagccctgactgtgccccgcagcctcctcacctttgatctgctcgctgttcccctgagggggtcccaagtccaagaatagtcgtggcatctcggggcccttcctctcgggcttgggggggtccccgtctccgctgagtgccgtgtctccgccggccctgctgtctggggccccgggctctccctcgggggccacctccggcctggctctcgggggcgctggctccagcctcctcggctgtgcctccggtggcggtggcagcggtggcggcggtggctgcggcctcgtgttgtctacccatccggcctttgcgtccacgccgcttccggggccgccgccgggggccgtccccgtgcccactggggctcggcccccactcccgaggtccagcctcccagcccctggggctctcggcgcccccccagtctcgggggctctcctctcggtcccgggttccagcgtcccgttcttgggggctgggccaagggggccaggggctgtctccccgccgttccgggaggagaccactgcgctgggtgcaggggctctctccagagaggtctctggggctggctccccgatcgtgggggctggaccccaactctcgggcgtcttctcccagggccctggggctctccaaggcccagtctctggtggcctctccgtgttcctggggaatctcaggcccccattctctgacaccttgtcctcgctctttgggggtgtcaggcccccattcaccagcaccttctccccggcctctggggacctcagctccccattctccagcgctttctcctccctccttgggggtgtcagctccccattctccagcactttctcttctctctcgggggaccccagggccccattctccgccgccttctcctcgatgcctggggctctctggtccccgttctccagcactgtcaccccgttcactgggaggctcaggcttggggcttgtttcccgttgcccaggactgtcgggtccctgttcaggcccgggactttctctctgttcccggggcctctccccgccttcctgggtcctgtctcccgggctgtcgcccccttctcccccaggaggttccttgtcacatcctcccgcagggacatcagcagctgttccgtgctcacttgaaccacgaaggtcggcttctcccggggccccgggagtgggagcggacccgggtctggaggtggccggggcgctcctgggtcgggtggctcggggggagcccgcggccgagggaccccttcctcctcggccgcccccccacctgggaaggctccctctggggaaaaaggggtctcggtctcgtagccgctgtcccccggcttggggcccggcgacgagaggcctgaaccgggactggccacggccgaaggggggtcgggggacgcggccgggtccgcgggggcccgaggaggtggcggcgggggggggggagcgggaggtggcccccgcccggggtactggggcgccgccgcccccatgagggggtccagaaactcggggggggccgaggcggggggggccatgggcaagtcggccagggagccccgctctgcccgcagcgaggagtcgtcctcgggggggtgggggcagccaagagcagggtggcctccccagcctgctacggcgtccccccgctccagtggcaggcaggagcaggccccctcgcggctgcacaggggacagggtaggggaccccggcggcttgggccacctccaaggctgctgctgtcttcccctggggagctgccctcctcctcctcctcttcttcttccacccacggggcggtcccccgctcccccaagacctcggcagggtctcccgccagggtctccccggcgccccggccctcggggtcccagccgctcagcaggaagctgcctgacgctgaggactgggctgggaagggccggggcgcagggaagaggggggaggcccaggtctcggacaccagctgggggacctcggagggggcctggggggcctgaggggcgggcactcctgggtccagggggtcccagtcgttggggaagaggggctcaggaggggagccgtgctcctccaagcggatgtagtactcgctgctcacggaggggctgcgggcgctgatgacaggcagcacgctgggcgtggacagcgcctcgtagaaagggttggaggggttggcgtggggggccgggggggccgacgccggctgccaggcaggtgcccccccaccccggccggccccacgccgggccttctcccacaggcactcgaggttgaggccgcggctactctcggtgaccgtgagcacatcgtcggggtcggctccagggaagccatccagtagggggaacggtgaggagagggtccccgggcggggcgcactgtgtgcagggggccagggccaggggaagggaccgtctcggggtgggggtggcggcggtgggggccggggaggccgctcggagagcaagtaggtgagctgcaattggagatcagaggctgaagggcgctgggcaggtggccgccagcaggactgaagaatgtcatacctggggagaggtggggcagagtgagcagggcagagacccagggaggggaaagagacccagggaggggacagacaaccagagagagggggacagagacccagagggtaacagagacccagagagagggggacagagacccagagagagggggacagagacccagagacagagggacagagatcc[137 bp omitted]catggtgaaaccccgtttctactaaaaatacaaaaaattagcctagcgtggtggcacctgcctgtaatcccagctacctgggaggctgaggcaggagaaccgcttgaacccgggaggcggaggttgcagtgagccaagatcgtgccatcgcactccagcctgggcaacaaaagcaaaaatctgccaaaaaaaaagaaagagagagagggacagagacccagagagagagggacagagacccagagagagggggacagagacctagagagagagggaaacatagacccaaaaagtggggcagagatccagggagaagaggggacagcagacggtagagattcagaggaggtaactgggctggggagctgggtattgagacccaaagaagcaggggtggggggaagatgcccatagagagaggctgacgggacctggaggcagaggggacacagcagcagatgggaacggctggtgagggtagtggtgtccctgtttgcgctgtgagctctggaatcagacaggtaagaagcagggacctcttagggtgaagtgggttcaaatcacagctctgccatcccctgcctgtgtccccctgcaagtagcagatgctggcagaaagggtggggacagcccctcttcactcttgaggggtatggagggcaaacgggatgtgggtgatgtgggaaacgaggggggatgctgggaccatcctgggtggggtgcggcaggccaggagccccgggtgggctagccctcaccagtagtccgcgtaaggcagcttgagcctcggccgggccagcttcacatgctgctggcggaccacgaaggcgaggacctcctcgtctgacaggtggcggtagggctgggccccaaactcaaacagctcccacagggtcacccccagggacctgcagagagcagagagaggtcagagcccagccctgacccacccgggcctcattttccccatctgtagaaccggtggcatctagtaacccttccaccttcctggcctgcctcggcccccgcggcccgtggtcctcaccagatgttgctctcgcggctctggtccaccaccatgaaggtcccgtggagctccccgaggagctcgggcgccgcccagcgcagtgggatccacaggcgctctggggtcaggtagtagtcctcctgagggaaccagggcggtgtcaggcgggtcagggcaccccacagcccccatcccgacggaaggaagccctaccttgtagttgctgtgggccagcccgtagtctccgatgcgcacggtcaggtcagaggtcagcaggcagttgcgcagggccaggtcgctgcgggaagaacgcgaggaggtgagcgcaggggcagccctccagccacgccctgaccccgccctttcacactgactccacccctcccatgaccctgccccgccacactgactctgccccttccctctgatctgtctctcccctctgactgctttcactctcccctgctgtcttgtcttctccccacccctggttcctccaagtctcctctccttttcctctgcactggctcctcctcttattcatctgacccttctggcttctcctgcttctctgttgactcctccccctcctctcccagccacctctcctcatcacgtgaccctgcttccccctcacctggctccttccgttcctctcctggaccctcctcctctcctgactcctccccctcccctgcccccctcccctggctcctcttccctctcctggctcctccttctctcctggaccctcccctatcctggctcctcctccttctctcctggcccctcccctcccctggctcctcctccccctctcctggctcctcctccccctctcctggctcctccccttatcctggttcttcctcctcctcccctgacccctccccctcccctggttcctcctcctcctctcctgaccccttttcctctcctggcccttcccctcatcacctgaccccgcctccctctcacttggttcctctcattcccctcctggtcccgcctcctctcctggccccttctcctccataccctcctcggttcgtccctattttgtgtcagccagtcatgggtccgccccccctctagcccctcccctgaggcctcacctccttcccccttccccttagtagctcctcccgcggctccccggcccgcccacctgtgcacgtagttgtgggaatgcaggtgcgccagcccgcgggcgatctccaggcccatcctctgcagcgtccgcaggtctcgagggggtagctcaggggacaggccctcggggggccgctgggctcggaggtaacgcttcaggtccccctgggagggaggcaaagaaggtcagcaccaccagccgctcaggtctccagctagtcggcccggaggctggaatggcttctgctgtcactgggtagcccctctgagccttagtttcctctgctgcttgcagcaggtaataacacagcccatcttgcctgcttgttcaggccagcccccaggacaggcagcactcatgaaatgttagcgcatgccacacatcatctacgatgatgatgatgatgacgacgaagcccaggggcaccaggcttggccccggccttgtccagctgccccctctgcccttccccaaccccccaagaccctcaccagttgacagaactccataatcagcagaaacggcagcgtctccacgcacagacccaggcactggaggacattggggtgctgcaggctcctgtggagtgaggaggtggctgagttgggaaggcagccccttcctcttcatcctgccccaacccccagcagaaccaaactgctgcctccacccttttttgttgtttttgtttgtttgtttgttttgagacggagtctcgctctgtcgcccaggcgggagtcctgcctcagcctcctgagtagccaggattacaggcatgcgccaccacgcctggctaatttttgtatttttagtaaagatggggtttcaccatgttggccaggctggtctcgaactcctgacctcaagtgatccaccctcctcaggctcccaaagtgctgggattacaggcgtgaaccaccgcacccggcccactctacctttttgatctcagtttcctcacctcggagtctctctcctcgaccacaccccactccttccccaggtccccatctctggatggccctcactggcctgctcctgggggagcaggtccccagggacccctttacctctccttcctccttacacctcacctccaccttcattcctgccccagactcttctcagtcttctcctcctcgtccccacagcctcctcccagcctccctggctctagtctctccccttccctttgcctcacctgcttttcaccacacacagccctctgtcgatccccagcaccccaggatagagcgccggctctttgattcctcctgctcctccggctggcccaagagtcagctttatcccatgtgggttttcccaaacctgcaggcccttgcttaggcccgggcctttgcacctacagttttctctctctctctctctctcttttttttccttccttgcttcctccctcccttccttccttccttcctccctccctccctcccttccttcctctttgagagggagtttcattcttatcactcaggctggagtgcaatggagtgatctcagctcactgcaacctccacctcccgggttcaagcgattctcctgcctcagcctcccgagtagctgggattacagatgcccgacaccaagcctggctaatttttgtatttttagtagagacagggtttcaccatg[131 bp omitted]ctctcatcagagttctcttggcccctccgggcctctgcctcaacatcatctccccgggaagctttgctgcccccccaatgccaggttggataccctcccctttaccctcacgctgtgggaaagagtcagactcgggggtttgaaccctgactcccactttcctaggtgtgtcatctcaggcaagccacttcgctgctccctgcctcagttttcctcatctgtaaaaatgggacagcgataacaacttcctctgaggaattacatgagatctgagagaagctggtatgtgctgagatcctagcaattactgctgttttaatggcaacatattatttgattttattttcaccctgcattcttttttttaagacagagtcttgctctttcgcccagtctggagtacagtggtgcaatctcggctcactgcaacctccacctcccgggttcaagtgattctcctgcctcaactccgagtagttgggattataggtacacactaccacactcggctaatttttgtatttttagtagataatgggtttcaccatgttggccaggctgctcttgaactcctgacctcaagtgatccacccacttcggcctcccgaagtgctgggattacaggcatgagccaccgtgcccaggcttcaccctgcattctaaatgtatttccagggctgctcactctccatgagcttcttcctgtcctacatcctttgtacctgctgttccttctgcctggaatgtacttcccatggtgctttgcatggctgacttctccaagtcaacccggcctccctgatggtcctatccaaggtggcccctgtctctgtcacatactgcctcattttctcatggtatttgtcattctctgacagtttctctctctctctctctctctcttttttttttttttttttttttttttatgagacagagtcttgctctgtcgcccaggctggagtgcagtggtgcaatcttggctcactgcaacctccatctcccgggctccagcaattctcctgcctcatcctcctgagtagctgggattacaggcatgtgccaccatgcctggctaatttttatatttttattagagacgggatttcaccatgttggccaggctggccttgaactcctgacctcaggtaatccgcctgcctgggcctctcaaagtactgagattacaggtgtgagccaccacgcccagctgacagtttctctttttaaaatgcatttctggcttggtctggtggctctcacctgaaatctcagcactctgggaggccgaggcaggaggatggcttgaacctagaagtttgagaccagctggagcagcatagtgaaactccatctctacaattaaaaaaaatatatagtctgggtgcagtggctcatgcctgtaatccctgcactttgggaggccgagatgggtggatcacctgatgtcaggagttcgagaccagcctggccaacatagtgaaaccctgtctttactaaaaatacaaaataagctgggcttggtggcacatgcctgtaatcccagctacttgggaggctgaggcaggagaattgcttgcacccgggaggcggagattgcagtgagctgaggccccgccattgcactccagcctgggcaacaagattgaaactctgtctaaaaaaaaaaaaaaaaaagtctgtaatccgaatactttgggaggccaaggtgggtgaatcacctgaggtcaggagttcgagaccagcctggccaacatggtgaaaccccgtctctactaaaaataccaaaaattagccagatgtggtggtgggcgcctgtaatcgcagctactctggaggctgaggcaggagaatcgcttgaacccaggaggcagaggttgcagagagttgagattgcgccactgcactccagcctgacaacagagcaagacttcatctgaaaaaaaaaaaaagataaataaataaaaataaaagttagccaggcatggtggctatgcaggaggctgaggcaggaggatcacttgagcccaggagctcaaggctgaagtgagccttgaaaaaaaaaaaaaaagtatttatttatctattgtgtgtcttctccactagggggtgagctctcctaggataagaatttggtgtgtcttcctgcctgtgtcctcagtgcctagactagtagtagatgctcaataaacacaggtggagagaaggactggcttggaggtctgcaggaggatgagaacatttcaggcttgcagcccagggtctggccaggagtaggtgcacagtaacttactagttattttcctactggggcctggcgggaggcagagccacttgtgtgctgtggggccactgccagtacccagccttctattgcctgtgtgtaaccgcggctctgctgtttatgctgtgtgtcctcaggagaacagggtctcttgcttctgtttggtggaagaatcgtgtaacaaagtgttgttattgttgttgttttctcacgctgtctcccaggctggagtacagtggtgtgatcttggctcactgcaacctctgcctctggggttcaaacaattctcctgcctcagcctcctgagtagctgggattacaggcgcctgcccaccacacctggctaatgtttgcatttttagtagagatggggtttcaccatgttggccaggctggtctcgaactcctgacctcatgatctgcccacctcagtctcccaaagtgctgggattactggtgtgagccaccgtgcctggccaatttttttgtatttttgtagagatagggtttagcccaggctggtctccaagtcctgagctcaggcagtctgcccgccttggcctcccaaagtgctaggattacaggcaggagcccgacaaagtgttcatgaagctcctgccatgtgtggggcttcaacagtggctggagttcccagcatgggagacttggggtggctggtgtagaaggaagccaggattcactgcacacccacgaatctggccaaggccggccgctctgctctcaaatcctcccagcaacgtgctaggcaggatgatgatccccatttgatccagatggaacagaggtgaagcgacttgcctagggtcacacagctggtaatgatgggaacattgggatttgatctcaggtctgtggctcgcccagcaaacgtctactgagagccagcagcacttgtgctcgggtaacgagacagaccctgagctgctgctagtagagacctgcactgtccaacagagctttgcgaaggtgggaatcttctggaccagccctgcctaccaggggagccactggccacaggtggctattgagcacttgagatatgatgagggtggctgaggaaatgtgtttttaatttgattgcattttaattagcttacattttatttatttatttatataatagagacagggtctcgctctgttgcccaggtgggagtgcagtggtgcagtcatagctcactccatcctccaatttctggcctcaagtgatcctcccaccttggcctcccaaagtgccgggactacacgagtataccaccgtgcccatcttagcttaaatgtaataggcatatgtggccagtgtttgctggcacaggtttagggagagacaggcaataagcaagtaagcaaatgatatagtgacaacctggggtatgggttatgaagaaaacacatgccatgacggggtgaagcaccccaggaccctctttggaaggaggggaggagtaagggaagatgtctctgagctgaggcctgaggaagggaaggggccccatccacacctggggatgagcaaggagtgatattctagagaggatatagcaaggtccgatgcgctgcggcagggaattggcttccgtggggagggtcagtgaagaggccagcgtggctggggtgagggggacattggaaggaagggacagtgtcagactgcgcagggcctgtgggctgtcaggaggaccagatgtgtcctgtaggcagtagggagccatgggaggttttggagtgagggagtgccaaaacccaatgtgtttctcagggtaaagcccacctttacaactgttctgataaggggtctctgcgaacacaccctttccaaaacagggaactcactacctcacaaggaatttatctggcaaatggatacctagaccccatcctagaagcactgagagtggagtagagaccaagaagggcagggatggagctccacagtggcctgctcgggcacctgctcagggacctagtctgtggcctggggaagggaagtaccagctggtacccaacattggacatgggaatctcacatcctctcagctgccctcttcatgaggacactagggcttcctggactcactttccagatgaagatccggaggttcagaggggagaggagcaggcctctagctcagcttctgtgctcccgcctcctccaccatcctgcctctcacttcccacccttagctcggtccagaggaagaacctgaggttcagggagggaagttctcctgccagagctgcacaaccggaagaggtagattccaggtgtgaccccatacagcactccttccactcctgaatgtcacctcaacaaggcacacacccactgagaaaccctcagtacctgtacggctgtgcttccgagatgaacttgcgttgctccaggggccccgcgctggctcggagctccttcaccaccacctgggcgggggtgtagtcggagaaaatctctcccaggatcacctggtcaaggggcacccaggagtcagcgagtgccgtttccccagccccgtcccctgggaccagctccactccaccacacagctcccaacccccggctccttcccagcttctccctccacatcccaccacccttgacccccaccagacatggggtgagacactcacgggcccagaatccgatggacgcagggacggatggaaggatggacagacggacggacgcgtggagagccgggtggcgcggcggagtggtcaatggagtgaggagggaggcgctgactgacagatgtcggggatggggcgggtgggagccggtgagaggtggacggaggggggatgggaggctgagggggcatggggaggaggcgagggacagatgagaagtggtgagagcaggggtgtggacacagaacaggaggacagctcgggatccatggagccctgcctcccctccccagcccactcaccttcccaaaccagccactcccaatctcctgcaggtagctcaggtgctgccggctaaggcccaggggggtggtcatgtctggggagggcaagaggggaaagcccctgagtctctcccccttcctgagtgctaccaacacaccccaggtcagtggggactgagacagagcagacatcactctcttttcattggctgccacccacattccatgtcagaatctcagcttcctcattggctgctcacaaggctccagcatccaatcagtccttccttttggcatcccaagctcctatgatgtgatttcagcctcccattggctgcctctgagactgtgctctatggtaatctcaccaccgcttgccccttaaaaatccccaaatctggttttggattaagcaatggcttccaccaagatgatctttgtctgcctccccataggctgcttccaagattccagcgctcccacctatgcctttcccattggctgccgctggtctcaaccgccccagcccctgaaggaacacactcaacatcttctggcctttcccgggacaccatgggatgctggtcatggcgtggggcagtacctgagtgtgaaggctgcggggcaggcattggcagggagacctcagccagcgggagaatgtagacatcaggcagcgactgtgaggaggaggtctcctccgcagggggagtgtactccccggagcagtcctccccttcagggttctcaaattcctggggccaggagaggagaagaggggtgggagaacgcagggctgagagacacgccatcgtctttctcttaagtttgtctccccttcatttttgtaactgtctcccagtcccagcccaatttccatcccccatttccccatcccaaggctccagatcttgccatagcttcaagctggaaggtgctctcggatttactgcccccttctccccaccaaccacctgtgtagggggtaaaggccttgctggagtcttcctccccaagttgaatcccctcatgcacctcaccttgaagccgacatcgccccgtttgcagcacagacaggtgaggaggaggaagatgaaggccagcaggccggagcaggaaatgaggaccacagcgtagggaggagccagaggagcccggcccagggcgaatccatctgtgggcacagggctgggctggggtcccagcttcaagtccctggataccggaatcatgccccctcccgtcccggcacgtcttggactacaactcccgtgatgctctgcgaccagggtcccttggcagaggtgcagagtggcccaaggcattgtgggagttgtagtttggggccttcccaagtggttggattgggggtggggtctctcttctcgtcccaaactgggacccccgccacctcatcccaccccatcccctcaccccaggcttggatgaattccaatgagggttgaaggaaagaggagtgatagtgaagtctggagcttgcagaatttaaaatacgctcccgtggacagcctcattacccctcgttggggaggaggactagctctcagctgcaggctgggagaagattcttgccccatgctggaaccccccagtttgtggggttgagatctgtctcttttagggacgcttggcgcacaccgatgttctctatccccagcccaagacccagagaagggaactccgcaagccctgggtctctccagaagccagagacagcctcccgtgttgtgtcccccttagaaatagtattcctgtcctctgcccccaattctcccagaggccctgtccttccccttcttcctgcacacaccagcacaaacacatgcgtgcacgcatacacacatgttgcccaaacggagccccctccccacccagcccccagcctccctcccacaggccctgctgacagaggcaccgtccccgccgctccgggccctgctgggctgcgggaagacgcgcaccaggtgacggggcaggacccgcagacagacccctgggcagacagcgaggccgccgcgggggtgggggccaccggacagactgatggcccgacagactcaccggggtgggccggggacgccaggcagccggaggcggagacggccgcaaggaggatgagggcgccgggggcaggcatcttgtcgaggatggcagggaggtggaggtggtggcggctggggaggaggggggggcgggccctcagcccccagccatggggacccgcgcgaccctggcctcctcccggcccaggagaggggcaggagacgcaggacagggggagggaggggctgcttgctggctcaggtacccccctccccctctttgaagggacagacggatgaagggatggagaggcggacagaggagagatgctggggagccggggttgctggggtgggggggagagggtaggatggggggggcgagaaagagggccccgcccccgagggcagccaggattgggggagcagagagcctgtcacaggaagggtgggaggagggaggatggagcgtcgtcatggcaactggctcccccgtagcattggctgccaggagggaggggaggaaatgggagggggagggacagacagggaccggcacacacttgcagcgggggtgggggggcagggcccacgggtgcctggcccggacaccgctgtgacatgccaccagcatggacacatgtgctacacgctaagatgcagatgtcaggcacgcgcagcccacacacagctgacacacgtcgcagggaccctcatagacaagcgcatcacatacaaaggtggacagccatcagcagacggggacacgtacacgtcacacacaaagacgcagggaccgcactggaaacgcacaggcaggccagcttccagcacagatgcacccggccacgcaggaacgtcaaagcatcacaaagacccacacatgccccggacaaagtaaagccccagatccacagacgcacacgccacagacaaagatccccacggacaccactgtgacatgctgacactcatagtcacagccacgcagacagtccctagacaaatgggcaacaaagaatacccacagacacaagtatcacatacatgcacgtcacacagacatgcacagacagcaattgcacagacacacgcagacacacacatcacatgaactaacatagacacggacacagcagctacacagagacaggcacatcacatacatgagtacacagaaacataatacatgcatgtatacggacacgtaacatgcatcactcacacggacacaagcttcactcacatggatacacacagacacactacatacacatgcatgcgggcacacacaactcatacatacagggctacataaatcacatgcaaaaatacacataaatacaccacacactgatacatacagacacatataacatgcacatatacacagtcacacatacataagcacagacataggcacacagatcaaatacacagacacacagagttgcacacatcacatacctaaacagacatggacacacacatcacaaatacacacacctttcacacaaggttacaaagacacagaaccccaccacagtcacacatcacatacataaacacacactggcacacataacacatacaaagagtcacacacccacaacacagacacagacacgcgcacagacacacgggtcgcaaatacccacgtttcccgtgcggttacgcagacattacacaaccacagcacttgcctcatacaaaagatacatgatcatagtttatttaatgtatttattcttatgagtatttagtctgtgccaggtatcgtccgcagcgttttacacgtacagaattacctctcaatcctcacaaccgccctctgagacaggtattttttaatcatgcccattgtacagatgaggcaactgaggcacagcgcggggtagtcacctgccccaaggcacacaagccggggagtggcaaagctgggactggaacccggtccatcggggacaccgacacatcagacaaggacacacatacatcacgtgccaggccgccgccgtctcggggtcacatcccaccctccagcgccccgagctgcagacacacccggaagcgcggactcccaccctgggcgcggacctctccatcgtccgtgagcacctgcgaggcgttcccctgggtgaggctgggccggagctgcgcacccaagacgcagcctcagcaacactcggcgcaggcgacccagcccccaaccccaacccccagcaggggcccagggctttccaccaaaacgcgcagccgtggcgcacaccggccgggcagtgcacactccccgcagagcgcagccgtcctcatcggggggctcaggggaaggggctgccctcagggtgtctcattggagaaactgaggcaggttcatcgcgggagggagggggcgcacggcctaggctgcagggtggaggggatgcaatcggggggcggggagtgagaaaagacgcaattcgctgcccgggtggctgaagggcacagaacctggcggaagcagaggcttatgggaggtgtagtcctggccttgagacttgtaggaaatgtagtcctgctcgacccagcaaggaggctcagattaagctgcggttggatgcgggtagcaggagccgaggaagggtccgctgcctgggtctttggaagtgatgtgggcagaattatcaagtcctagggagcggcacaggcggggctgcagtcctgactctggccccagctcgcttgttcatgtattcactcaacgaacgtttactaggtgcccactatgtgattaggcaggcgctgggccagaagctggggctgcagcaggaagcaagtgagacgcgttccctcaccttctgggagtctcgggggttcaaggaaagcagccacgagtggaataattgcacatcaggacttagcactgccgggcaccactgagtcagggtggggatggagtgggtcttgtctggggagtaacagagggttccctagagctttccaaactgtgagcgcccagccattagcaggggtgatatcaagatcctcggtggtctcagaaacaaagtcactctctgaaaagaaagaaagacaaaaaatcctccgtggcaatcagcactttttttttttttaatgggggccgggcgtggtggctcatgcctacaatcccagcactttgggaggccgaggagggtggatcatgagatcaggagatcgaaaccatcctggccaacatggtgaaactcggtctctattaaaaatacaaaaattagctgggcatggtggtgcgtgcctgtagtcccagctactcaggaggctgaggcaggagaatcgcttgaacccaggaggcagagattgcagtgagccgagatcgccgcgccactgcactccagcctggtaacagagcgagagtctgcctcaaaaaaaaaaaaaaaaaaaaaaaaaaaaaaaaaaaaaaagagtatcagtctgtttaggtcagttttatcaccaaacttgccctaaaactttttcctttttgacactttattgatttcaaaactgaaactacatgtcagtggttctcaaagtatggttcagagtcgcttaggagtccctgagaccctttcaaggggtccatgaggtcaaaagtatttgtatactaccctcctgagatgttaactgcctttttcgttctcattcactcataagtggacagtagaagtttccagaagttgcctgacatgtaatgaatggctgcactgaagacagacacagatgcaaggatccagccagacattaaagagatgtgcggccgggcgcggtggctcacacctgtaatcccagcactttgggaggccaaagccagcggatcacttgaggtcaggagtttgagaccagcctggccacagagtgacagagtggaactctgtcaaaaaaaaaaaaaaaaaagattttcaaaatgacacaaacaatgccactcaatgcactgaatttttttggaaaatagttttttttttttttgagatcgagtttcactctcgttgcccaggctggaatgcaatgggggcgatcttggctcactgcaacctccagctcccgggttcaagtgattttcctgttt[134 bp omitted]tggccttccaaagtgctgagattacaggtatgaggagccactgccactggcttttttttttttttttgagatggagtcttgctctgttgcccaggctggagtgcagtggtgcaatctcagctcactgcaacctcctcccaggttcaagtgattctcctgcctcaacctcccgagtagctgggactacaggcgctcgccaccatgcctgactaattttttgtattttagtagagacggggtttcaccgtattgcccaggctggtcttgaactcctgagctcaagtgatccacccgccttggtctcccatagtgctgggattacaggagtgagccaccacgccctgccaaatagttattatttttataaaaataggtttatacgttaacttgcaatggaaacccagtgctttgggaggccaaggtgggaggatcccttgaggtcaggagttcaagaccagcctgaccaacatggcaaaaccttgtctctataaaaaatacaaaaattagctaggcatggcggcgcacgcctgtagtcccagctactcaggaagctgaggcacaagaatcgtctgaacccaggaggtagaggttgcagtgagctgagatggtgccactgcactccagccggggttacagagcaggactctgtttcaaaaacagcaacaacaacaacaaattggctgaatgaaggaaagaacgaggttatttcctgcaggtgcatttgatgactgattcaagccaggaccactcccctgttgcttgggtgttgtccactcagcacaagtttccagccgatgggttatgactgtccattccagggaagaggaagagcaagctgtcatgaggacgcagaagggtgcactgcactgaaccagggttccttgcagagaagcctccagagaggatgacgtttaggcccggctgtggctgggagcagggttgagtctgaggctgggggtggggagctgagcagggagggcattccaggcaggggccacagagggcacaaaggcctggagctgtggaactgcttgggacctttgggaaacctgcacctgccccgcccaccacctccccagcgtggtggctccgacccaaaccttccagtcactgctgactggctgtctttttcccacacctccacgtccagtccattagctgactctattttcaaaatattcccagaatctggccacctctcaccacctctacttccaccctcgttgtttgcttggactattgcagtagcctccttgatgatctccacactcggcccctcaccccatggtctcttcttgctacagcagccgaggaagcctcttaactccgaagttagcccatgtccctcttgtgctctcaactctcccacggctcccatctcatttggagtaaaggccagcatcctccccacggcccacgcaactccaaattatctggccccccgagtctgtttgccctgttcgctggtacactttgccttgttcattcccttccagccatgctggcctcctccctgttcctccaacactgcatgggcaagaaacagctttggggcctttgtactcggcgccccgcgttctctggggactccccgttccccaggtctgcacctggctgacgtctttctttcagttaggcttctgcccacgtgtggcctccccagagatgctttccttggccaccaatggagcagccctgacccttacccccttcttgtcccttaacccatttcatttttctttcttttttttttttttttgaaatggagttttgctcttatcgccccggctggagtgcaatgatgcgatctcagctcactgcaacctctggctccccgggttcaagagattctcctgcctcagcctcccaagtagcagggattacaggcacccgccaccatacctggctaatttttgtattttcagtagatactgggtt[186 bp omitted]acctctgcctcccggattcaagcgattctcctgcctcagcctcctgagtagctgggattacaggtgcgtgccaccacgccccgctaatttttctatttttagtagagatagtatttcaccatgttggccaggctggtctcgaactcctgacctcaggtgatcctccagactctggcactcaaagtgctggaattactgcagctggtccctgtttcatttttcttcattgcaatcagctccacctgacttggggccgcatattcgtgcatagagccctggagaacaaggatctttgcttttgtttcctgctgtgtccccagtgccgggtacacagaagaagctcagtgactgtgactgcaggaatgaagctgggatgatagggagagacagccccagcagtgggcagaggttgccagaggctctgtctgcagagccaaggagttgagtctccacttggaaagcgagtgtgtgcgcagcagggtaaccagggtgaccaggctgcaggatggcggggacacagcctcctcctcttttatgaaattgaagcaccattagggtatgagaggctgggggaggaatattccatgagcccaggatgctgcctcagacttcattcactaactcattcattcattcattcattcattcatccattcagcaaacaaacaagcctccattccagcagcctggttgggtggacaaaaagaaagaagctgaagggacagcaatatcaataatgatattttatttcacctttttttttttacttttaaaattttttcttttcccacacctgccaaaacagcatttatttcactctttgttttttttttagacagtgtctctctgtcgcccaggctgcagtgcagtggtgcaatctcggctcactgcagccaccaccttctgggctcaagcgattctcgtgccttagcctcctgagtagctgggattacagacacgcaccaccacgcctggctaatttttgtatttttaggagaggtgggctttcgccatgttggtcagcctggcctcaaactcctgacctcaagtgatccgcctgcctcggcctcccaaagtgctgggattataggtatgggccaccacagcctggcctatttcactattaatggaggtataatttacaacaataacaagcagagattttttttttttttttttgaggcagagtctggttctgtcgcccaagctggagtgcagtggcgcgatctcagctcactgcaagctccgcctcccgggttcacgccattctcctgcctcaggctcctgagtagctgggactacaggcacctgccaccatgcccggctaattttttgtattt[152 bp omitted]atcacgatggcgcagtcttgggtcactgcaacctctgcctcccgggttcaagtgattctcctgcctcagtctcccaagtagctgggattataagcatgcaccaccacacctagctaatttttttgtgtttttagtagagatggggtttcaccccattggtcagactggtctcgaactcctgacctcaagtgatccaccctcttcagcctcccaaagtgctaggattacaggtgtgagccactgcgcccggccaacaagcagagatcttaagggtacaatttgaggccaggcatgatgactcatgcctgtgatcacaacactttggactttgcactttggtgcaaagttggagagtttgagaccagcctgggcaacatagtaagaccctggttctacaaaaataaaaattaaaaaataatctgggcatggtggcgcacacctgtagtcctagctactcaggaagctgaggcaggaggatcacttgaacccaggagttggaggctgcagtgagctatgatcgaactactgcactccagcctaggtgaca[223 bp omitted]ggctgaggtgggagaattgcttgaagccgggaggcagaggttgcagtgagccaagatcacgccactgcattccagcctgagagacagagtgagactccatctcaaaaaaaacaaaaaacaaaaaacagaaaacaaaaaactggagaacacgatggcctgggaagaaaaagctccaagagctccaagatataatgtgaagtgaaaaaaatcaagtcacagaacaatgagaatagtgtgatacaatttacataagaagaaaacaagccgggcgtgggaacatttcttgtagttccagctgctcaggagactgaggcaggaggatccctggagcctaggaatttgtagtggcagtgagctatgatcatgtcactgcactcctgcctgggcaacaaaggaagatcccattcccatctctaaaaataataaaaaaacagaaagcaacaacaatcccaagctgcttttttttttttttttgagacggagtttcgctctttcgcccaggctggagtgcagtgtgcgatcttggctcactgcaacctctgccttctagtttcaagtgattctcctgcctcagcctccctagtagacgggattacaggcgcccaccaccacgcccggctgatttttgtattttcagtagagatggggtttcaccatgttggccaggctggtctcgaactcctgacctcgtgatccgcccctctcggcctcccaccaaagctgcttttttctgtgtgtgactgagtcttgctctgtcacccaggctggagtgtagtaacgcgatcttggctcactgcaacctccgttccctgggttcaagcagttctcctgactcagcctcctgagttgctgggactacaggcatgcaccaccatgccctgctaatttttgtattttagtagagataaggtttcaccatattggccgggctggtcctgaactcctgacctcaagtgatccgcctgcctctgcctcccaaagtgttgggattgcaggtgtgagccactgcacctggccccaaagatgctttttgatatatgtacacacacacacacacacacacacgcccagcaaaagatgtgcaaggatagtatagtaatgaaactcggggtgcacatgaaatgtgaggtctgtatcactcaatatttttgttgtttgagatggagtctctctctgtcacccaggctggagtgcagtggcatgatctcagttcgctgcatcctttgcctcccaggttcaggtgattctcctgcctcagcctcctgagtagctgagactacaggcatgcgccaccacgcccggctaattttttttttgaatttttagtagagacagtgtttccccatgttggccaggctggtctcaaactcctgacctcaagtgatctgcccaccttggcctcccaaagccctgggattacaggcataaaccattgtgcctggcctcaaatttttaaaaaagaagactatattcatacatactaagtatccctatatttttatttgttcatttttatttatttattttttaagagacaggatgttgttctattgcctaggctggagtacagtgacaccaccatggctcactgtagccttgccttcctggactcaagcaatcctcctgcctcagccttctgagtaactgggactacaggtggacaccaccatgcctggctaattatttcatttttgtagagacagggtctcacaatgttgcccaggctggtctcgaacacctgggctcaagcaatcctcccacccaggcctctcatagtgctgggattacagacatgagccaccacgcctggtctctctctctctctctctctctctctctctctatatatatatatatatatatatattattattattattattatttttcctcttttcttcgagacggagtctcactctgtcgcccaggctggagtgcagtggcatgatcttcactcactgcaacctctgccccctgggatcaagcaattcttctgcctcagcctctgtagcagctgggattacaggcatgtgccaccacgcccagctaattttgtatttttagtagagacagggtttcaccatgttggccaggctgatctcaaacccctgacctcaggtgattggcccacttcagcctcccaaagtcctgggattataggcatgagccatcgcgccctgcttttctttttttttttttttgagacggagcctggctctgttgcccagactggagtgcagtggtcgatctcggcttgctgcaacttctgcctcccgggttcaagcgattctcttgcctcagcctcccgagtagctgggattacagggacgctccatcacgcctggctaatttttgtatatttagtagaggtggggttccaccatgttggtcaggctggtctcaaactcctgacctcgtgatctgcccaccttgtcctcccaaagtgctgggattacaggcttgagccaccgtgcctggccccgggctccatatattttaaattgtcgtttaaaacttaggtggtcaggcgcagtggctcttgcctgtaatcccagcactttgggaggccaagtcgggtggatcacctgagatcagaacttcaagaccagcctgaccaacatggcgaaaccccatctctaccaaaaaaatacaaacattagctgggtgtggtggcacgcatccatagtcccagctacttggggaggctgaggcaggagaattgcttgaaccctggtggtggaggttgcaatgagctgagatcgcgccactacactccagcctgagtgacagagtgagaccctgtttcaaaaaaacaaaaacaaaaacaaaacaaaacaaaaaagaaaaggaaggagaaggaagaggagaggtggataattgatgttgggtatcaataaggaggatctgcattttaagttaggcctgttcataaaatatcttgaatgccaggacagttgcttggattgtattctctgggcagtggtgagtcatgggaagttttggagcaaggtagaacatccataccccagcacagcagttaatctttttctttttttcagggacaggagtcttgctatgttgcccaggctggaatgcagcggctattcacagaataatcataccacaccacacccttgaaaccctgagctcaagcaatcttcccacctcagcctcccaagtagctgggactacaggcacccaccaccatgcctggcttagcagtcactttttaagagatgacttccttggcaccacaatctagattatttccttttctatatgctctcaaagaacttggctcctttatttcatagcatcttgttttattagcatattatattgagtaatataattaggtagtgtaattataaatacttgactcccactgcaatgctggtgtcaggcaagcagggactgccttggtcttgattgtagttatagatctggaagctagcttaataattatctgctgaacaaatgaatgaatactctagagctgttgtttaaaagatagcaactcttccatccttccagaagttctcatgactgaacccacctaactgtggttcaaaggttcttggccgggggtccagggaccctcaaaagtcttgtggatataatttatggggtctatggccttagataagaagaaaaatcacaaatcacattttccttttccccaagctctaattgatatctagtatttcttcgttttttttttttttttttttttttttttttgagacggagtctcgctctgtcacccaggctggagtgcagtggcacgatcttggctcattgcaagctctgcctcccaggttcacgccattctcctgcctcagcc[135 bp omitted]cagcctcccaaagtgctgggattacaggcttgagccactgcgcccagctatttcttcctattttcatgtcagattgtattttccaaagatagcctcaataatatctcccattccatatgctcttccagatcttgccacttccccattgggaagtgaagactatgggaagtgaagactatgtctccacaccttgaacctgaagggactacctcaaccaacaaggattcaatagaagtgcttctgtgtgacttctgaggtcaggttgtaaaaatgccatgccttgttttcttagtacaaacactcttacaattcagcttccatgatgtgaggaagcccaagagtctgtgaggaggcccacatggagaggaaatgaaatccccagccctcaattccctctgagctgctagccaacagctagcaccaattcttagaactcagcctccgtgctgtgaggaagctcaagagtccacgaggaagcccacaaagagaggaaattatgtccccagcccttagtccccactaagttgctagccaacagtcagcactaacttgccagccatgtgagccatcttgaaagtggtttcttattagatgcactgaagacatgaatagaaaaataaaaataaaatacagaaagtgggttcttcagctcccagaggagctgcctcaattgttgcctcattgatcagagatgagctgcctctgctgaactccacccaaattgaagacctacaaacaaaataaataactactattgtcttaagcaattaagttttgcagtggtttgttacacagcagtagatgactcatacaattatgaatacaggtaacattagcaagatctgtgattttgtttattctggaatttattattctagcaacataaatcacagatatttccaaatcacatcatggttgttgcaaatacttgaaatattcttttgcttcctcactgttttgaaatatcagttataggccagacgcggcggctcacacctgtaatctcagcactttgggtggctgaggcaggcaggatcacctgaggtcgggagttcgagaccagcctgaccaacatggagaaaccctgtctctactaaaaatacaaaattagcctgacatggtggcatgtgcccgtaatcccggctactcaggaggctgaggcaggagaaatccttgaacctgagaagcagaggttgcagtgagccaagatcgcaccattgcactccattccaggcaacaagagcaaaactctgtctcaaaaaaaagaaaagaaaagaaaagaaaaagaaatatcagttattagacttgctattagatctgctagattttttttttttttttttgagatggagtctcactctattgcccaggctggagtgcagtggtgcaatctcgactcactgcaatctctgcctcccaggttcgagtgattctcctgcctcagcctcccgagtagctgggattacagccgcacaccacaacacccagctaatttttgtatttttagtagagaaggggtttcaccatgctggccaggctggtcttgaacttcttaccttgtgatccgcccacctcggtctcccaaagtgctgggattacagctgtgaaccacaacacccagcctgatttttttttttctttttaaatagtgacagtgtctccctatgttgcccaggctaattaaactcctgggctcaagcgatcctcctacctgggcctaccaaagtgctgagattataggcataagccactgcacatggctggatctgctagatcttgttatttaatgttaataaagaagcgtatatattatataaaaatgtgacttttgaatattttgaaaactgttttagttggttttgtaagcctatgaattttcttttatacacttaacttttttgagaaggtattgtcagggtataatattcaaaaaacagttaaaaacatgattcatacaaatatatagtaagcacacatctaggatttatttaatacattaatgggagaaccaaaagaatgacagacttgttcaaaggaggataggacaggccaggcacagtggctcacgcctggaatcccagcactttgggaggctgaggcaggcagatcatctgaggtcaggagttcaagtccagcctggcaacatggcaaaaccctgcctctattaaaaaaaaaaaaattagctgagcatggtggtgcgagcctgtagtcctagttacttgggaggctgaggagaatcacttgaacccaggaggtggaggctacagagagctgagattgcaccactgcactccagcctgggtgacagagcgacactctgtctcaagaaaagaaaaagagagaattctagatgaaaatgatgaatttatagagaaaaacagttaataacattcagaacaataacttttgggattttatgtctacccaaaaaacaataatttcgatgcattggttctgaacaagttaacatataactttacagagtttagacccttaatcaatagaaagtcatacaaattcccccagagtagtggttggcaaattgtggcccacagatcaaattctgcccatttttgtaaataaagttttatgggaacatagtcacatacattcatttatgtgttatcttattatcacttatgagctttttgcatgacaccagtagagttgagtagtggtaacagagaccacatggcttcaaagccttaaatatttatctgaccctttatagaaaaaaatttgcctccccattcctagaatatcagatgctacttaagtggtcttgttagacagtgcccttagagccctaatgtccaataaggtagccaccagtcacttagctatttaaatttaattcagatgaaataaaaaacaaaaaattcagttctcagttacactctctatttcaagtcttcaatagccacatgtggctagtggcttttgcacagttcaggtgtgttgcaaagtgttaccctgggaagcactgatgtcgaataacataggaagtatacactgtttgcattatatccagagttcagttaatctttctcaacaaggcccaaggcctgctaaagaaatatttcagttattcattactgcattaaaaaaaatccccccaatatgtagtggcttaaacaacgatttattatttttcatgataccatgtgttgactgggctctgcaaggcagttcttctgttcatctcatttctcttggagtctctggtcaaattggagtcaggtagtggcacggactggaacttttttttttttgaggcggagtctcactctgtcacccaggctggagtgcagtggcatgatcttggctcactgcaacctccgcttcctgggtccaagcgattcttctgcctcagcctcccaagtagctgggactacaggcatgcacaactgcgccgagctaatttttgtatattttttttagagatgggggtatcacc[139 bp omitted]tggcgttgtggtggggtagctgggagggttgcaatgatctctctccatgtagtctcttcacatggctgcttggaccccaaaagggagagtttcaagaggacaagcccaaacatacaagtactttaccaaacttctgcttgcatcatgtttgataatgttgtactggccaagcccaatatcccatggaggggactccacagggtgcaaacatctggaggtgtggttcactgagacccttcagggtccatggtgcaagaacaggttgaagacccccccttgaatttccacctgttgtatgagtccctttcacccatcctgagcagccaccacatcccactgagtctacgtagctcctcaacctaggtaatgcctggtgctcagtgtgggtcctagtgcagctgctgcaggctctctgccctggtgacaggctggcttccctccatcaagatttggaagggagggctctacctggtgacttctctcttgtccaagggggtctctccagatctgggctccttgccccagcaccaccagtcccactttttttttttttttgagacagagtctcactctgttgcccaggctagagtgcagtggcgcgatctcggcttactgcaagccccgcctcccaggttcacaccattctcctgcctcagcctcccgagtagctgggactacaggcacctgcaaccacgcccagctaattttttgtatttttagtagagatcgggtttcactgtgttagccagggtggtctcgatctcttgacttcatgatccacctgcctcagcctcccaaagtgctgggattacaggcatgagccaccgcgcctggcctaccagtcccacatttctaatgtcctatcagctcctccagtctccctggaatctcttcctctaaatctattgtgtctgccctgcccagggcttttgaaattcaaaagccaaaaatggccttctttgtcgtctgcattctgccttttcctgtgatatggcctcagaaagctagagctgttgcctgaacgaatgggtgaacaacagtaaacatttgtg[141 bp omitted]agaaaccgtctctactaaaaatacaaaaaattagccagctgtggtggcaggtgcctgtaatcccagctactagggaggctgaggcaggagaatcacttgaacccggggggtggaggttgcagtgagccgagatcgcgccattgcactccagcctgggcaacaagagcgaaacttcatcgcaaaaaataaataataaataaatcaatcatctccaaactcaaaacaatcattgtttattatctcatgatttctgtgagtccagagtttggtgtttcatgtggttacagtcagatatcaactggggctgtggtcatctgaaagcttgactgaggctggatgatttgccacctgggcttgttcacatggctggcatgttggagctggcaagatggttcctctccacagagctgcttgagtgtcctcacaacatggcagccagcttcccccaaagcaagttatctatggtggaagttgcaatgccttttgtgacctagtctcagatttcttttactgtcacttctgttacattcctttgatcccataagccaaacctgattccatagggaggagactacacaaagatgtgaccactgggtggcgggaatcattaggcgccatcttggaatctgtctgctgcaatctggggctgatatcacatgcagttaaaataactgaaacttggccgggcacggtggctcacacctgtaatcccagcactttgggaggccaaggcaggcagatcatgaggtcaggagttcgagaccagcctgacagacatggtgaaactgcatctctactaaaaccataaaaattagccgggcatggtggtgggctcctgtaatcccagctactcaggctgaggcaggagaattgcttgaacccaggaggcagagcttgtagcgagccaagctcgcaccactgcactctagcctgggtgacagagtgagactccctctcaaaaaataaataaattaaataaataaataaataaataaataaataaaactcatccatctccaattgtctaggacactctgatctttccttccttccttccttccttctttcttttttttgacacagtttcgctcctgttgcccaggctagagtacagtggcgcgatctcggctcaccacaacctctgcctcccctgttcaagcaattctccggcctcagcctcccgagtagctgggattacaggcatgcaccaccacgccgggctaatttttgtatttttagtagagacagggtttttccgtgttggtcaggctggtctcgagctcctgacctcaggtgatccacccacctcagcctcccaaagtgctgggattacaggcgggaaccatcgtgcccggccgatttatctttcaaagccgtggctgaaacgttccccactgaccaatgacactgctgccagcccctggggggaccacgttgctctgttcccggtgacgtagctgccttaacgcgtccagtgggtcgtcccaattcccctctggctttgcacttgtgtgtttgcacatctgctgttaatttaaatgagacaaaaatcctcactctctttaaatgcagagaatacagagttgtgggttttattttacctttttttacaaagagaaaagagcgtgatgcatactaaggatcctctgttggctccacaaaggcgtcttctaagtatgcctttggaattcagagccggcagttaaattctgatgaccaaatctgagaagtaagagtcgtggttttcttggggatggagggaatgggaatgagggctcccgggataagggatggggatgggcttttgggaggctgggaatgttcttttttttttttttaacctggttgcagcataactgatgtgttcatttggaattaattcatcaagctgtacacttttgaaacgtgttgtctctttttttttttttttttttgtgacagagtctcactctgtcactccggctggagtgcagtggcacaatctcagctcactgcagcctccgcctcccggttcaagcaattctcctgcctcagctgcccaagtagctgggattacaggtgccgtgttatcttatgtttgtacagtataacccaataaaaactataaaaaatgttattgacagggaaacaaataatcaaataagataacaaatcagagtcaaagactgtttagaaacaggattgtccagtggttaagagcctgggctgtttatatttgaatcccagtgtgccaccaaggctgtgtagctttgggtaagttactcaacttctcggaccttaaagttgtatatctgtgaaatgaagacaacacctacgtctacctcaatgagaagcaggaaatatgattaagaattgagtttaggactgg[273 bp omitted]caaaaaaaaaaaaaaaaagaaagaaagaattgagtttaagactgggtgtggtggttcacacttgtaatctcagcactttgagaggccgaggcaggaggatcacttgagtcccagagtttgagaccagcctgggcaacataatgagactcccatcactataaattttttttttaattagctgggcgtggtggcatacacctgtggtcccagctatttgagaggctgaggcaggaagatagcttgagcccaggaggtcgaggctgcagtgagctatgattgtgccactgtactccagcctgggcctggagtgagatcctgtctctaaaaaacaccaaaacaaaacaccacaacaccaaaacaccaaaacaaaacaccaaaacaccaaaaaaaaccaccaaaacaaaacaacagggtttactcaagcacaaagtttgagatagccagactctgaaagaatgtggtgattcttaagtggggaagaaaaggtttcacttatgtaggcagaaacagagaagtttaacagcatttaacatgttccatacaaagccagtacacaacgttctgtgatatgatcggtggcagtttgctagattttaacgaagatttattttttggtttttttgttggtttgtttttgagtctcactctgtcgcccaggctggagtgcaggggcgtgatctcggctcactgcagcctctgcctcctgggttcaagcgattctcctgcctcagcttcccaaatagctgggagcacaggcacatgccaccacgcctggctaaattttatatttttagtagagacggggtttcactgt[140 bp omitted]tgagggggtctcatctctgacgccattccattacttctcatcatttccaggaagaagcagaagttgcagttgctggctgcatgactcaagccacttagatttctcttgaggctcaaaataatgtaatgttccaatagctttaagtttgaatgatttaatttcacacctaccgggcagaattacctgagataaatagaacaaagcatctagccaggtagttgtcacagagcagatgttcaatcaatgacattcatatcgttttgg[134 bp omitted]aatggtgaaacctgtctctagtaaaaatacaaaaattagtcagttgtggcggcgtgtgcctgtaatcccagctactcaggaggctgaggcaggaaaatcacttgaacctgggaagcagaggttgcagtgagacaagatcatgccactgcactccagcctgggtgacagagcgagactccagctcaaaaaaaaaaaaaaaaaagaaaagaaagaaagaaagaaatagaaaatgcagaactgtcatgccaataaaaaatggacaaggacgtgaacagacaagtcacaaggcagaatgacagtagattacaaactggtgggaaggtatttatcctcagtactcactgtttttaaatttctttgtgtgtgtgtgtgtgtgtgtgtgagagagagagagtctcactctcttgcccaggctgtagtacaacagctcaatctcaactcactgcaacctccatcttccaggctcaaatgatcctcccacttcagcctcccggaaagctgggggactacaggcgaccgccaccacgcccggctaattttttttttctttttttttttttttgagacggagtcttgctctgtcgcccaggctggagtgtagtggcgcgatctcgactcactgcaagctctgcctcccgggttcatgacattctcctgcctcagcctcccgaggtagctgggactacaggcgcccgccaccacgcccggctaattttttgtatttttagtagagacagggtttcaccatgttagccaggatggtctccatctcctgacctgatgatctgcccgcctggacctcccaaaatgctgggactacaggtgtgagccaccacaccacgcccggctaattttttgtatttttagtagagacagggtttcgccatgttgcccaggctggtcttgaactcctggactcaagcgatccgcccactttggcctcccaaagtactaggataaaaaatttattattattgttatttttcattttttatagaggtggggtctggatatgttgcctcaggctggtcttaaactcccgggctcaagtgagccttctgcctctgcctcccagtgtgtcgaggtcacaggcgtgagtcactgcaccggccagtagtaactgtcttcagagcgtgtattgttctctgaagtaatcaagtccacttatttgtctgtatgtttaccgtccatctcccctcttctcatcccttagaaaatgaggtccctgccaggcacagtggctcaggcctgtaatcccagcactatgggaggccgaggtgggcagaccacgaggtcaagagttcgagactagcctggccaacatggtgaaaccccgtctctattaaaaatacaaaaattagcctgggctgggcgcagtggctcacacctgtaatcccagcactttgggaggctgaggcaggcggatcacctgaggttgggagttggagaccagcctgaccaacgtggagaaacaccatctctactaaaaaatacaaaattagccgggtatgctggcacatgcctgtaatccctgatactcgggaggctgaggcaggagaatcacttgaacccgggaggcggaggttgtggtgagccgagatcatgccattgcactccagcctgggcaacaagagtgaaactctgtctcaaaaagaaaagaaaatgaggtcctcgagggcagtgcttctgtgtcagtcttgctcactgctgtctcccagtacctaaaacacaggctaccatacagcaggtgctcaagaaactatttgtggactcaatgagtgaatacataaatgaaaatgagagccaactcttcacttaccaaattagcaaagctctctaaaaggcttatattcagtgccagcgaggatgccgtgagtgtgaatgagtggagattattttaacttttctagatgccaacttggtactcttaccgagtaattccatttctgggactctgttctaaggaaataatataaaatgtgcacaaaagtttatgcacgaagattttctctatagcattatttgtagcagtaaaaataatagaaacaggtttaatatttgtataataaacattatatatttctaacaataaggtctagagaaaggctttgtaaactacagaacagcaatattgtgaaatatcatgtaattattttaattaaaatgaaaaaaaggttttatgatacattaagtagaaatacgcagggccggacatggtggcttatatctgtaatcccagcactttgggaggccaaggtgggtggatcacctgaggtcaagagtttgagaccagcatggccaacatggtgaaaccctgtctctactaaaaatacataaattagccgggtgtggtggtgcgcacctataatcacagctactagtggggctgaggcaggagaatcacttgaaccccggaggcagaggttgcagtgagccgagattgtgccactgcactccagcctgggcgacagagtgacactccatctcaaaaaaaaaaaaatgtgtaatacagcaagatataaaatgatatacggtcatccattggaatccataggggatttggttccagaaccccacctaccctacagataccaaaacctgaggatgctcaagtcgctgatataaaacggcatagtgtttgcatagaacctgcgtgtatttcccctgtttatttatttatttatttatttattttttgagacagagtctctgtcaccccaagctggagtgcaatggcgcgatctcggctcactgcaacctccgccttctgggttcaagagattctcctgcctcagcctcctgaatagttgggattacaggcatgtgccaccatgcctggctaattttatttcattttataataaaattttattaatttaatttaattttattttatttatttattttgagacggagtttcgctcttgttgcccaggctggagtgcaatggcacaggctccgctcactgcaacttccacctcctgggttcaagcaattctcctagctcagccttccaagtatctggaattacaggcacacgccaccacgtccggctatttttttttttttttgagatggcgtctcactctgtcatccaggctagagtacagtggcgcaatcttggctcactgcaacctctgcctcccgggttcaagcgattctcctgtctcagcctctggagtagctgggactacaggcgcatgccaccatgcctggctaacttttttgtatttttagtagggacgggatt[132 bp omitted]ttccaccatgttggccaggctggtcttgaactcgtgacctcaagtgattcacccaccttggcctcccaaagtgctgagattacaggcgtgagccaccgtgcccagcctcctcccgtgtattttaaatcatctccacattacttggaatgcctaacacagtgcaaatactaagtaaatagttgttatactgtattgcatagggaataatgacaagaaaaaaagtctatacacattcagtacagacacaatttttttcctgaatatttttgattcactgttggttgaatccacggatgcagaaacccacggaactggtacgcagtagcacctcctctctctcacactatatatagagagaggggattttatttatatatgtcaacgtagtgtaaatgtaagttttcatatatacatgtgaaattggtaggacaacaacaggatgctaaccacacaattttacaaagataaaacctggaaatactggaagtagatgtatcggaatgctatcactggtgggagaaatgtgactccttgctgggggacatactgttatctgtgggatgtatctcctcgcagagttttttttctgtatatttttcccacatatttatttatgtatttttttaaatttttatttatttatttatttttgggtggggagacagagtgtcgctcaggctggagtgcaatggcatgatcttagctcactgcaatctctgcctccgggttcaagtgattttcatgcctcagcccccaccagtagctgggaccacagtcaccggccaccacgccctactaacttatgtatttttagtagagacggggttttgccgtgttgttcaggctggttggtctcaaactcctgacctcaagtgatccgcccaccttagcctccaagtagctgggactacagatgtatgccactatgcctggctaatttttttattttgtagcgatgaggtctcactatgttgtccaggctggtctcccactcctggcctcaggtgatcctcccaccttgacatcccaaagtgctgtgattacaggcctgagccaccgtgcatggtcctatttattcatctattttgtagagacagggtcttgttctgttgcccaggctggaatacagtggtgtgatcatggctcactgcaaccttgacctcctgggcttaagccatcctcccacctcagcctccaagtagctgggactacagatgcatgccaccatgcctggctaatttttttattttgaggtctcactatgttgtccaggctggtctcccacttctggcctcaagcgatcctcccaccttggcctcccaaagtgccaggatttcaggtgggaaccaccgcacccggtctcggtttgatcactttaattggctgcattgcattgcaagaatgactgtatcttggtttatttaatttttcccttatgcacggcatctgggttgtttccagcttctttcccatgacaaacataaacaacactgcagtaaacatcactgagttcacgtgatttggagatgtggaaattcaggaacgaagggggcccttatctaaatgtcaaccgacctgtcccatggcctccagagagactgcatgtccctcctcctccattgttttgcaattctcagcttttctattttgagcttgtgttatttttcttatttatttatttttattttaattgaagttctgggatacatgtgcagaacacgcaggtttgttacataggtatacatgtttcatggtggtttgctctatctatcaacccatcatgtaggttttaagccctgcatgcattaggtatttgtcctaatgctctccctccccttgccccccaccccccaccgacaggccccggtgtgtgatgttcccctccctgtgtctatgtgttctcattgttcgactcgcacttatgagtgagaacatgcgttgtttggttttctgtttctgtgttagtttgctgagaatgatggctaccagcttcatccatttcccttcaaaggacatgaactcattcttttttatgactgcatagtattccacaatgtatatgtgccatattttctttatccagtctatcattgttgggcatttgggttggttccaagtctttgccattgtaatgtttatttatttattctttaagataagagttttgctctgtcgcccaggcctgagtgcagtggtgcattctcggctcactgcaacctccacctcccgggttcaagcaattctcctgcctcaggctcccaagtagctgggattacaggtgaccaccaccacacctggctaatttttgtacttttggtggagatggggtttcacctt[138 bp omitted]gtgaattcttcccagtttgttgagagagctgtgggtctatggtgctgaggggagtagacaaagcccctcctcctgacaccccaaaccaatgggggagacagacagagcttccgacttccttagcttggggactggcttttaaaaaccgcacagggctgggtgcggtggttcatgcctgtaatcccagcactttgggaggccaaggtgggcagatcgcgaggtcaggagttcaagaccagcctagccaatatggtgaaatcccatctctactaaaaaatacaaaaagtacaaaaaatagccacgtttggtggcctatgcctgtagtcccagctactcaggaggctgaggcaggagaatcacttgaacctgggaagcagaggttgcagtgagccgagatcacgccactacactccagcctgggcgacagagtgaggctccatctcaaaaaaaataaaaataaaaataaataaaataaaataaaataaatgaaagtaaaaattgcccaggagccaggtgtggtggctcacgtctgtaatctcagcactttgggaggccgaggcgggcggatcatgaggtcaagagttagagaccagcctggccaacatggtgaaactccgtccctactaaaaatacaaaaattagctgggcgtggtggtgggtgcctgtaatcccagttactcagtaggctaaggaaggagaattgcttgaacccgggaggcggaggttgcagtgagctgagattgtgccattgcattccagcctgggtgacagggcaagactttgtctcaaaaaaaaaaaaaaaaaaaaaaacaaaactgcccaggaaattcttacgcgcagtcctacgtggggactagcggcccagagctactgcttattaagcatttattatgagccaggaaaggtgcaaaatgttttatccttgagtctagttcatgcctccagcagaagcccaggcccctgggttctagcatggtcttctgccagcttcgacttggacaagtgacgtcagtgccctgtatgttggttttctcattggaaagatggagataataatagtgcctactcataggatcatcatgaggctgaaacgcgtagctgtgcagatctcttggcactgtgccaggcactgagtatgttctacacaagtgtttgacaaatataataaaactgatggctgggcacctgtaatcccagcactttaggaggccgaggcaggtggatcacttgaggtcaggagttcaggaccagcctgggcaacatggtgaaaccccctccctactaaaaatacaaaaattagcggggcatgatggcgggcacctgtaatcccagctactcgagaggctgagacacgagaatcgcttgaacccgggaggcagaggttgccgcgagccaagatcgcaccactgcactccagcctggatgaaagagcgagactccatcccaaacaattaacaaaaataactgactgtgtatcttggagtgacagagctgtccctgcttgtgtaatgtgcctatccatgcattggcgaggcgtgtcgatcctgcagctgggagagagtttgcatgggaggaggcagcgtgagagatcagtccccaggcacagaggaaaaccgagctgggactcagctctcacggtcctgccattcagccagctgagaggcacagtcccacatccagacccttacttgtgctgtctcctctgtccagaacactctttcctttcctcacctccttcaaaggcttgttccaatgtcatcatcttggtttaaagtggagattcagcttaaccccttccccacctgtgcctactgtctctcgattggccttattcttctccatggccctcaatgtacacgtttacctggaaagtgctccctgcaaggcagctgcataccattattaagactctgtgacaggccgggcgtggtggctcatgcttgtaatccagcactttgggaggccgaggcgggcggatcacttgaggccaggagttccagaccagtctgaccaacatggtgaaaccccgtctccactaaaaatacaaaacttagcctggtgtggtggtgagtgcctgttatcccaggtactcgggatgctgaggcaggagaatcgcttgaacccgggaggcggaggttgcagtgagccgagatggaaacactccactccagcctaggtgacagagcgagactccgtctcaaaaaaaaaaaaaaagaaaaaagaaaaaaaaaagactctgtgactacatatatacacacacacacacacacgcatatatatatatatatatgcgtgtgtgtgtgtgtgtgtatatataggtgtgtgtatatatatatatatatatatatataattatacacacacacacacacacacacacacacacacagagatgaggtctcactatgttgtccaggctggtcttgaattcctgagctcaaccgattcttccacctcactcccccaaagtgctgggattacaggcgttagccaccacacctgggctactaatatgtatgtatgtatatatatatatatatatatttttttttttttttttttggatacagagtgttgctctgtcacccaggcttgagtgcagtggcgcgatctcggctcactgcaagctcctcttcccaggttcacgccattttcctgcctcagcctcccaagtagctgggattacaggtgcccgccaccatatccagctaattttttttatttttagtagagatagggtttcaccgtg[136 bp omitted]cccaggctggagtgcaatggcgcgatctcggctcactgcaacctctgcctcccgagttcaagcaattctcctgcctcagcctcctgagtagctgggattacaggcacctgtcaccacgcccagctaattttttgtatttttagtagaggcagggtttc[137 bp omitted]ggtgtgtgggccaccagctcctcccccatgttctctgctctggccgcactggcctcctttacattcgtctatcacaccaggcacctttccaccacagggcctttgcactggctattctcaatgactgcaatactcttgccccagatatgcacccagcttgctgcctcacctccatcaggccacctcctctgagaggcccaccttgactgcccacctaaagcatctcttagtttagccaggcatggtgttgagcgcctgaagtcccagctattcagaaggctgaggcaggaggattgcttgagcccaggagtttgataccagcatgggtaacatagccagaccccatctctacaaaaataaaacataaaaaattaaggctgggcgcaatggctcacgcctgtaatcccatcactttggaaggccgaggcgggcggatcacctaaggttgggagttcgagactagcctggaca[138 bp omitted]cacggagaaaccccgtctctgctaaaaatagaaagttagctgggcatggtggtgcatgcctgtaaccccagctactcgggaagctgagcaggagaatcgcttgaacccgggaagtggaggttgcagtgagctgagatggcgccattgcactccagcctgggcaacaagagtgaaactcagtctcaataataataacggtaataaaataaaaaattagctgggtgtggtggtgcatgcctgcctgtaatcccagctactcgggaggctgaggcaggaaaatcgcttgaacccaggaggcagaggttgcagtgaaccgagatcgcgccattgcactccagcctgtgcaacgagagcaaaactccatctcaaataataataataataataataataataataataataataaaataaaataaaataaaaaactggctgggcatgggagcacgtgcctgtaattccagctattcaggaggctgaggcaa[145 bp omitted]tgggaggtcacatgttcgcactttctaggattaggacccgaacatctcttgggggggcaatgttcttcccaccatgagtccgttctcactttttttttttttttttttgccactctgtctccagcgcctggaacggtgcctggcatgcaacaggtgctggggaatgaatgaacgtgaatggatggggcccagcggcaggaagggctggaagcatgtgtcatggagcatgttttcagggactgagggccaaggaggaagccaggcccctggaggaagtgggggcagtgccctggcccgaggcaggaggaggaggagccgaacagggatgagcaagatgagggtgggaggtggaaagatgaagcagcgattggggcgtcctgttctcctgtaatccggcctcctgcccacccatgcaccaccctcgggctgggcgcaggcctccctgaagccactgcagggaaggggggtatcggagggtggtggtgcacggtgattcccaactggcacagctggtttgactggtcctggcgtttggcagaggagagcgccggggacaggtgaggatggtgctgggagcaccccaggcccaaaagacacaggggaggagtggctaccgtgctcaccggtgtacccctatagaccccagaccccccaacacaacactcccaccgcacacccctcacttggctcagtctgtcccagcccaggaaaccagaaacccaacctccctgacccccagtcccagcccttcctccctcagacccaggagtccagcccctcctctctcagacccaggagtccaggcccccagaccctcctccctcagacccagaggtccaggcccccagcctcctccctcagatccaggagtccaggcccccagcccctcctccctcagatccaggagtccaggcccccagcctcctccctcagacccaggagtccagacccccagcgcctcctccctcagacccaggagtccagacctccagcccctcctccctcagacccaggagtccaggcccccagcccctcctccctcagatccaggagtccaggcccccagcctcctccctcagacccaggagtccagacccccagcgcctcctccctcagacccaggagtccagacccccagcccctcctctctcagacccaggagtccagacccccagcgcctcctccctcagacccagaattccaggcccccagcccctcctccctcagacccgggaatccaggcccccagcccctcctccctcagacccgggagtccaggcccccagcccctcctccctcagacccaggagtccagacccccagcgcctcctccctcagacccaggagtccagacccccagcccctcctctctcagacccaggagtccagacccccagcgcctcctccctcagacccagaagtccaggcccccagcccctcctccctcagacccgggagtccagacccccagcgcctcctccctcagacccgggagtccagacccccagcgcctcctccctcagacccaggagtccagacccccagcgcctcctccctcagacccaggagtccagacccccagcccctcctccctcagacccaggagtccagcctccagctctggttccctgacacattgtcactacagccgtggcctgttgggccccctgctctgtgtgcacctgcctctctccccaccctgttccccttttgtgaccatgcagccagtaaggacccaggttctggccttcagtccccccaccccactcccccagcatccctccccagtctctgtcaccttggggacccaggagccggcactctcagtggccccctcccaagagaggagcctaggcgtggtgtggggcccaccccaagtggcctccagcccagccccagcccagctcagggcaggcggggcatgagtgtgagtgtgagtgtgcggggtggggcgggcggtggtatcggccctgggggcctgtgccggcacatcgtggggatggagtaatcagggtggggtggggagcagacaaggaggtttcgctgcaccccaagatggacccagtgattagaggggacggctggggggaaccagcgtggctttgaggtgtcagccgccatctctcaccccacccatctgaggttgcctgagcctcaagggggcattgcgtgggcttggggacaggggtgtcctctaccacccgtaacctccccccaacccccttccccaggtccacatgtctaagtgtcccatttttgtctgtctgggtcactggggtctggcccaggcccctcctccatcaaacccaggagcctggtcccccagctctggaccgtgcccccttcccaccccattcgggttcctccttggatccttcctgacttgggatttggacgccccgcccccagcccctgccccctcgggaacccagcctctaagcagccagggctggctgtcctcgggctcccagaactcccggcaatgactggcttttaatggaaaggtcgggctctggaggtgacaatggcctcgattctgtggaaacgtgacctcatgacccagtgacctccctttgcctatgtctgagctccaagagcaaaatggcacatcccagggcttggggggcaggtgggcccccccaagagaggccaaggaattgctccacgatgggagtcccctgctgtccaccctcagcccattggcaaggccacttccaatgcccccttcgcaatcagcccaaggtgtagaacaggagacagcctccttgtggtcggtggcacacaggtgacgtgtccatcgtgctttgggtttatgggagtggagggcatgtcctgagtggcccagcccatccccacctgccacccttaagcccccagggatgggtgtgagtgtccctggacgccctcactgtcaacccctacccaggaacccaggactacctccctatccccagtgctattctttgttttgggggcttttgttttgttttgtttgttttgttttttgagatgaagtttccctcttgttgcccaggctggggtgcaatggcacgatctcggctcaccgcaactgccgcttcccgggttcaagcgattctcctgcctcagcctcccgagtagctggattacaggcatgcgccaccacaccgggctaattttgtattttcagtagagacagggtttctctgtgttagtcaggatgatctcaaactcccgacctcaggtgatctgcccaccttggctgcccaaagtgctgggattacaggcatgagccaccgcgtctggcctgttttgttttcgtcacccaggctggagcacggtggtgcaatcatagctcactgcagcctcaacctcctgggctcaagtggtccttccacctcagcctcccgagtagctgagaccacaggtgcaccgacaccatgctcagataatttttaaattttttgtagagatgaggccttgtagcccaggctgatatcaaactcctgagcttcagcgatcctcctgcctcagcctcccaaagtgctgggattacagaggtgaggcactgagcctggcccccagaggccccctctttggcctggaggaaacacctcccaatgtctttccagcctctaggcctttgtctctgccaggctttctaacaagacgccttttccaccactcaagtcccacttacccatctggtgagttcctctgtccttggttttgcctactggggcatccttttcctgggaagtcattcctggcctcccaagaaggtcctggcctctacagccagggtatcaagcacatggaacttagcccaagccagcagtcaatacaaatagcctccaagcacacacca[138 bp omitted]cgtggtgaaaccccatctttactaaaaatacaaaataattagctgggcatggtggtgcgcccctgcaaccccagttactcaggaggctgaggcagaagaatcacttgaacctggaaggcagaggttgcagtaagccgagatgcacagatcgtgacagagtgagactctgtctcaaaaacaaaaaagaaacaggtaaaattaattgtagttttctccagctttaagactggaagggccaggtgtggtggctcacctgtaatcccagcactttgagaggctgaggcaggaggatcatgaggtcaggagttcgagaccagcctggccaacatggtgaaacttcatctctactaaaaatacgaaaaaaaaaaaaaattagccgggcatggtggtgggcgcctgtaatcccagctactcaggaagctgaggcaggagaattgcttgaacctgggaggtggaggttgcagtgagccaagattatgccactacactccagcctgggtgacagagcaagactccgtctcaaaaaaaaaaaagactagaaggaaaaaagaaaagaaaataattaattgtaggaatagattttattcaatttgatgtatctaaaatatcaccacttcagcatgtaatcaatatagaaattacccatgagatgttttatatgctttgtatctcaattttgatgctcaatttcgaaaaggtacattaaaatggaattaattaaatgaaaatttaatttcatttaaattaattaaaatgaaataattttttattttttaaaaatttttaaaatgaaataaaattaattcattttaattaatttaaattaattttaatttttttaaattaaatttatttaaattaattaaaatgaaataaaatggaaaattttcactttctcagtcacattgcacataggtgctaaatagccacctatggccagtggcttctgggatggacagcacagatgtaagccatttacttacatgtcttgtttgtggacacaatatcagagactgacccagaggaggtctctacagatattagttggaaaaatagactattggatgcctggatgaatggatgagtggatgcatggatggatggatggatggatggatggatggacggatggtcgaatggatgggtagatggttggatggatggatgaatggatggaggatgcatagaaagatggatgcatagatggctggttgaatggatacctggctgagtggatgaatagaggatggatggatggatagaaggatggttgagtagatgcttggatggatgaatggatagacagtgatgaatggatggcaggatggatggatgaatggatagatgaaggaatggttgggtgatggatgaataaatggctgaatgaatgcaggatggatggatagatggatggttggatggttgggtggctagatgaatggatggaaaatggatggatgggtgatggatggctggatagatggatggttgagtagatggttggatggatgaatggatggatagatgatgaatggatgaagaggtggatggtttgatggctgatgaatggatggagggatggatggttggatgggtagatagatggatgttgaatggatgattggataagtggttgggtggctgaatgaatggttgggtggatggtcgggtggatggatgatggatgaatagagggacaggtggatgcatagatagagggatgaacagctggagggatgaatggatgtataatccttgctcctctcactacccatgaccaagtggctctgggttttccacttgcattttcccacactcttcatctttttttttttttttttttaattgagaccgagtcttgctctgttgcccaggctggagcacagtggcacaatctcggctcactgcaatctccacctcctgggttcaagcaattctctgcctcagcctcctgaggagctgggattataggcacccaccaccactcccggctaatttttgtatttttagtagagacggggttttactatgttggccaggctggtcttgaactcccgacctcgtgatccacccgcctgggcctcccaaagtgctgggattacaggcatgagccaccaagcccagcccactccttcatccttctggtctcgtccttgtctcccagatgtccaagaccctcagattcatttctgggggttgatggtctccactagtatctctgcactctcacaattggctaaaatgtcactctggtgtcttctggttcctccttgccacctctgtaggagtctggacccctcgccttccagaatcaggcttttgcatctcctcagctccctcctcattctccacagagattcagtggacttctcctggcaccaccatgaccttcactcattccatcacgtcttcctgtgacaattcattcattccatcaacaggcacttattgagcatttactatattccaggctcttcccttgggaaataaccgcagatttgacatagaacaagcccttctttcatggggttgacagtctagtggggagatagatggtaaacaagacaaagaagcaaaacatttaggaggtcagatggtgacgagtgctatgggaaaaagtaaaacaggaaagaggaatggagaagttggtggacgagcctgggggaggtgacactgggcagagtcagacgataggagcccacgaagctcccaggtatcaggaacatgcgggaatagcaagggcaaaggccctgcagtaggagcctcccctgggtcttaggccgcctagtttggccagtttctttccattgcccactcaggcacaacctcaggccctactgctccccaaccttcctgtgccccggggatgcctccgcacctgcctgcgagtttccctctcaggatccctaaggacctgggcattcccttccccagactctccctaaccccccaccccagcagcacacagagccagggacaaagggtcattgaatagaaaacaaaggtgaagacagcccagccggaggcctggtggggtgtcatggttcagtcccccacctccgacatcagaggggttcactcagcctcagagggggatgcctggccctctcacccttccacccaccctgcaagagagcctttttatcagcaggaacatcaaggcttaacactgaaagtatcaaggcagaatgttgaggatgtggactcggtagtggctgggggcaggggcgggtgctcccacagctcagcctcctggagacgggtcttggggtggtgaattgagagatgggataccccagaaccctccttttctgcttaccatcagagtgaaggcgggcagtgctgtgtgccctgggggaagccacattacctctctgggcccccttcctgcatctgttaggtgagtctgacgtcttccatccccctcacctatgcaacaataattggtcagtatatacaattttatttgttttggctttttttttttttctttttgagatggagtttcactcttgttgcccaggctggagtgcaacagtacaatcttggctcgctgcaacctctgcctccagggttcaagtgattctcctgcctcagcctcccgaatagctgggattacaggcacctgccaccatgcccagctaattttttgtatttttagtagagatggggtttcactatgttggccaggctggtcttgaactcctgacctcaggcgattcacccgcctcggcctcccaaagtgctggaattacaggcgtgagccattgcacaggctttcttttggcattttttttttttttttgagatggagtctctctctgtcgcccaggctgcagtgcagtgatgtgatctcagctcactccaacctccacctcccaggttcaagcgattctcgtgtctcagcctcccaagtagctgggattacaggcacctgccaccactggtggggagactggcttcatgactccaggactctgaggggtcagggaccaacagctggggagggccagggtttggggtgggggcagaagagaagagaacaccgtctatgctgagctcactgtgtaccagatcctccaccagcagctgagagtgtctccctcagtcctcacaacagcccgatgggtgccattcacagatggggaaactaaggcaagatgagcctatgagcaagatggttcccggccccacagctgggaggcactggagctgggatttgaaccagggctgtgaccttcagactctcacgcccaaccatatctggcagttgtctctcatatctgtgtctctccctgtccctgacctttctatgtatctctgtctctgccctctgtatatcgctgctgggtctctcagggtctctgacccctgtgtgtctctgtctcctctgggtgtccgtgtgtctctgtctccgccctccgtgtatctctgttgcgtctctcaaggtctctggcccctgtgcatctcagtcccctcctggtctctgtctcccatgccctctgccctctccctttctccctggctcccgccctgtctgtgctgccgtggtcctggctgtgcctctgtccctgtgtctgtttccagggtgccccttacgcgtcagcccgtgagggcaagtttctgtctgccccttccccagcggtggcctagtgcttggaacagcgcctggcagacaggagatgctcagtaaatatttctcaaatgaataaaggaatgaatgagtgaatgaatgaatgaatgaatgaactcgctgagatgggcgagatcagcgccatttcccaaatgagcaacgtgggctccaggtgggtgcccacaggcccagaactgccagcccggaaggttctggcgtgggcttggcactgaccccctggactctgcccccagctgagcaccagacgccaggacgtgcccatcactgctcctccccgccctcagagcagggtggctccctctggcctctccccgctgttggaggcgtgggtagcagctgggagaaccggctgggtgctgcccctccccttgggccgggcacggagtaggcacctggcgggctccccaggtggcagacgctgtcgctgcgcacacctggcctctgtgccgcctgctccctgctcgtcctcccctccccaccctcacccacctgccatggacgggcccgccgagccccagatcccgggcttgtgggacacctatgaagatgacatctcggaaatcaggtgaggcccagacctgggcaggagccaggagatcccagggaggaggtggctgtttgggggagccggggactgtggcaagggtggcctccagccacccgcagccgcaggcctggcccagacttagctggaggggctgggctgggctggggcatccagtgtggtgtataggtccctcctgagaagggagtgaggacccgaccgtgttgagtcaccagtggggatgcctggggtgtccctgtcgctctccgggcctcagtttttctgtctgtcaaaggggcccacaagccctgtgtctccctgatagagcagtggaagagagcaggcagcttggtgcatagtagttgctcaggaaacacaacagcctgtagtacccaggacaccccatgcaagccctgaaataacgggggtgcttgggggtgaaatgggagagactgggatgctgctgagacccccagagggagaagctgtgttctagggcacttggggcggagagggcaggctctggactcttcaggtctcctaacagtggttagggcagagcactgcccacttccatgagctcagcgtgactccctcttcctggggatgagtcagacactttgacagtacctgctttccagatggggaaactgaggctgggagggaacgcgacatgaccgcaattacgcagctagaagcaaatctgaacccggtctgtctcacgccagagcctgtggtttctcctgctcctcacagccttggtgatgtcccctttacacccctccccgtggctccatcttttaggggagcgcagaggcccagagagggcaggcagcctgccccagatcacacagcaaactgctgagacaatctccaacccctcgtatcttgcactcttgccaagtgagaccttcctggcagcctgggcccctccagccaccgtgggctgtgaggagggagacaaccaagacctgttctcagcccagttgcctcattcctttcttattttattttatttttttgaaatggagtttcgctcttgttgcccaggctggagtgcaatggcacgatatcagctcactgcagcctccgcgtcctgggttcaagtgattctccagcctcagcttcccaagtaactgggattacaggagcccgccaccatgcccggctaattttatttttgtatttttagtagagaaagggtttc[136 bp omitted]ctcccctccctcagccagaagctggggcatgaagaggccttcctgggtgcctgggactccagagacaggagcagttcaatcctgattgctgtgtgacctagacaagcttcctgatgtctctgggcctcctgggctgagagctgtgaccaggctggcccagttctgcgtgagggaggccccagcattctttactcaacattgtctaatccaggacttctgagttctgcaattcttctctccagagataaacagataagccagctcgcctccagggttcccgcctctgggaaggcctcacccccaccccagccaggcacctgggagccttttttttatctccgcgacggctctgccagctggtcataaaacgccctgagtgacctcgctaagtgggtgaccttggtttagtcactgaccctctgcgaagctcggtttcgtcatcgtgggggagaatagccctcccctgcaagactcctccagccctgatggctgcagagccctgggggggtgcccttaggacctcaaacttccaggcacttctggaatcccccaggcctggaagcgtgcctctccccagcgagcctgctggagcatccccctggggcccacttccttcgggatgtgcccctcccagaccccctcagatacgccacgtacccccccagattcgcacctcctcccaggttgcccatctcagggatgtcccctccccatcactggctcagatccacagggcttctcctggccccgacttccccctctgctcgcccccagcctgtcagtccccaacccccacccctgtcccctgactctctgccctggttcttcctctcggttgccacagccccagctcaggcctcctcatctccccccaacctcaccactccagccttggctgtcccaggctgctcctcccctcctcccagccatccagtgaattcctcagcgcccagccctcacccaccccgcccccccagcctcctcacctgcattccagctactctactgctttttttttttttttttttttttttttgagactgaatctggctctgtcacccaggctggagcacagtggaacgatctcggctcactgcaacctccgcctcccaggttcaggtgtattacctcatctaatcctcacagccatctgagatgaacccactttgactgctgtcatcctgtgtcagagatgaggcccagagaggttgagtaacttgcctagggtcacacagctgccaagcagggcacggccaggatttgaaccagggaagcctgactgttatcatgccctggacagggaatttagggatgatgagcaagaccaggaaggagcgagatccaggaggtagactcagcccagatgggaggtgaagcgggcgctctgaggttctagcctccgagtagctgggatgacaggcgcgtgccactgcgcccagttaatattattactattatttttttgagacggagtctcactctgtcgcccacgctggagtgcagtggcacgatctcggctcactacaacctcggcctcccaggttcaagcgattctcctgcctcagcctcccaagtagctgggattacaggcacccgccaccatgcctggctaatttttatatttttagttgagacaggatttcaccatgttggccaggctgttctcgaactcctgacctcaggtgatccacccgccttggtctcccaaagtgcagggcttacaggcgtgagccaccgtgcccggcctatctactctattactttgaattccctggccacgcttgttccctgccacagtgcctttgcttatctggctccttccatagggatcccagagacatcttctctctctctctctctctctttgcttatctggctccttgcatagggatcccagagacatcctctctctctctctctctctctctctctctctctctctcttttgagacagagccttgctctgtggctcacactggagtgcagtggcacaatctcggctcactgcaatctctgccttctggattcaagtgattctcttgcctcagcctccagagtagctgggattacaggcatgcgccaccacacccagctaatttttgtttttttttggagatggagtcttgctctgtcacccaggctggagtgcagtgatgcgaacttggctcattgcaacctccgcctcccaggttcaagcgattcttctgcctcagcctcctgagtagctgggattacaggcacactctaccatgcccggctaattttttgtattttagtagaaacggggtttca[131 bp omitted]tttcgccactttcgggactttgcgtgcaccagcgcagtgtcctttgcctgggctgacctctgccctctctccttcctttgccaaacttctcaggcgttaagattcaacacgggcaatttaggatttttggccaggggaatgagagaatgcaggcagacacccacgccaggtcccaggtccctgatcacgctggtctagcttcaaatctgccccgtggcaccaaaatattggcctgttcgtggataggaaatgaatgtaggaaatctgtgaaaaggacgtcaagaatgaatgaatgaatggaggctccattaagcaacctctgagccggagcttccaggatgagtcagggttagcagacggggaggaggggcagggagtgctgggaaagggaatggttggggcacagggacacaggtggcttcaggagagtaaggggcagctgggtcaggagagggccagctgccgtggaaactccccgtggtgggccatcctgcagcagacctgagtggctctcaaatggttcgttttttaagcacctccagggagagaaactattgttttcagaatacacgcatatgtgatttaaaaaaaaaaaaaaagttgccagctcagtggctcacacctgtaatcccagcagtttgggaggccgaggcaggtggatcccttgaggtcaggagttcaagaccagcctggccaacatggtgacaccccatctgtactaaaaataaaaaaattagccagagttgtgccacacacctgtaatctcagctactcaggaggttaaggcaggagaatcgcttgaacccaggaggcggaagttgcagtgacctgagatcctgccactgtactccagcctgggcaacagaacaagactctgtctcaaaaaaaaaaaagttgtcctaggccaggcatggtggctcctgtccattgcagtactttgggaggccaaggcaggagtatcatttgaggccaggagttcaagaccagactggacaacacagcaagaccccgtctctaaaaaaataaaataaaaaccaaacaaggaattgaccagaatttaattcaggatagcagctcaagggacgggtagatgccacaggaaggggcccagagatatcagcaagatgcatcgctcagaatgttctagtttatggggttcattatgaattatgagaaatttaatatgtgagatcgggctctgtggctcatgcctgtaatcccagcactttgggaggctgaagtgggcggatcacttgaggtcaggagttcaagaccagcctggccaacatggtaaaaccccgtctctactaaaaacacaaaaatttgccaggcgtggtggcacttgcctgtagtcccagctactggagaggctgaggcaggagagttgcttgaacccaggaggcggaggttgcagtgagctgagatcgcatactgcacaccagcttgggtgacaagattgaaactccatctcaaaaaaagaaaaaagaaatttaatatgtgttccatgtggtcttgtatgtaaaaaggacttaaaaggataataagggctaaattaaaatcgtaagaggccgggcacggtggctcacgcctgtaatcccagaactttgggaggccgaggtgggcggatcacctgaggtcgatagttggagaccaggctgaccaacatggagaaaccccgtctctactaaaaatagaaaaaagtcagccgggcatggtggtgcatgcctgtaatcccagctactcgggaggttgaggcaggagaatcgcttgaacccaggaggcggaggttgcggtgagtcgagatcgtgtcattacactccagcctgggcaacaagagtgaaactctgtctcaaaaaataattaaaattaaaaaaattaaaaaaaataaaatcgtaagaggaaaacatttggcacaggcggtaggcaggatgggctgctgacccagtaggctgacaagcccaggatgttataatccctgtaacatccttgcagttgttctcaacctgttgagtgctgtctgtattacctcatctaatccttacagccgtcggagattaacccattttaactactatcatcccctgtaagaggtgaggcccagagaggttgagtgacttgcccagggtcacacagctgccaagcagggcgtagccaggatttgaaccagggaagcctgactgtatcacgccctggatggggaacttggggatgagcaagacccggaaggagcgagatccgggagggagactcagcccagacaggaggcgttagcaggcgctctgcggttccaggcgtttccttgcattccctgcgtgctgggctacggagagtgtcaaggccagagaagccacgccggcctttggacctggggcgcctcgggcagccaaggagagctgcggtggccgctcctccccgcgctctgatctcgggagtccctggcgccggcaccttctgatctctgcctcttattgacggggagggcgaggaggggccagctctggttttacaaccccggccccaccttccttagggagggctgagccacatgaatgattttatgg[132 bp omitted]gcaacagccgcctccggggttcaagcgattctcctgcctcagcctcctgagtagctgggactacaggcgtgcgccaccacgcctggctaaatttttgtatttttagttgagacagggtttcaccatataggtcaggcttgtctcaaactcctgacctcggatgatccacccgcctcgtcctcccaaagtgctgggattacaggtgtgagccaccgcgactggcctgaagctgctttttctgagacgggctgatcaaggggtttcaaacaattaagaaataataaggcattgcctccccgctgggtgagatttgggcaggcagactagggagaggggcttcggggccagcactagcggatgcggggacttggggagaagtggaaaaagatgctcacggttccctccttctccacccagcccctgacgagggactcagccttgaagagtgagggacaggatgcgttttcctttccactcgctctttggggtggggggaggcagttgtgcctggtgggcctgtgtacggactggcagaggaaaggttggaagtggtgatgttcagagttcaggacccatttggttttgttttttgttttgttttgttttgttttgttttgttttgttttggagacagagtcttgctctgtcgcccaggctggagagcagtggcgtgattttagctcactgcaacctccgcctcctgggttcaagcgattctcctgcctcagcttcccaagtagctgggattacaggcatgtgccaccatgcctagctaatttttgtatttttgataaagacagggtttcgccatgctggccagctgagttcaggacccatttggaaagaactaagcagcccagtttgccacccagagggtctggaggaggaactgtgggacccagtgggtcacccatgacatggaataaatgccaggctgagaagggagaccctcgccttgcccggaggcctggagtggaggccctaagagaggtgtggccagttacttacgtggggaccagagccccaaggatctgggaaagtggggaccgtgacaccgcaggcaagaaagcctgcaggggccaggtgccacagctcacgcctgtaatcccaacactttgggagggcaaggcaggaggattgcttgaggccaggagttcaagaccagcctgggcaacatagcaaaccctcatctctctttaaaaaaaaaaaaaaaaaattaaaaagaaaagaagaatgcccacaggaaggcagtcctgggttcgaatgccgcccctatggctcaggagctgggaccctcctggtagaaaggactgccctcagggttgagcgtctgtgaaacgggcaatgaccggggaagggcctgacctgggctcgcagctgactcagcatttgtgctgtttctctctttcctccttccccagttctgagaccgctgctgagccagaaactcgaatgctagcaagggaggggatgggtgaggaatgataataatgatgagcttcctgagcatctgccctgagccaggccctgtgctgaaggctgtgtggggatgagctcactgagtcttcacaacagccctgtgtggtcccagtgttacaatgcccattttacagatgggaaaactgaggccccactcataaccctcatgccagagaaaggaatccaacaggggcttggaactgcagtcagaggctgcccctcagtggccatttcttctcggggggacttgtcacccttatggtttccatgaccctggccaccctccatagatatataccgtgagcccataggaaaacattttctcgtagccacctttttaaaaaaacaaaagaaacaagtgaaattaattttaatcacatatctaatctatctgaaatatcatttccacatatagtcaatttcaaaaactgtcaatgaggctgggcgtggtggctcatgcctataatcccagcactttgggaagccgagacgtgtggatcccttgaggtcaggagttcgagaccagcctggccaacatggtgaaaccccatctctagtaaatatacagaaattaggacagccgtggtggctcacatctgtaatcccagcactttgggaggccgaggtgggcctatcatttgaacccgggaggcagaggctgcagtgagctaagatcctgccattgcactccagcctgggcaacaagagcaaaactccgtctcaaaaataaaaaaaataaaaattagccaggtgtggtggtgggcgcccgtaatcccagctactcgggaggctgaggcaggaggattgtttgaacccaggagacggaggttgctgtggggctgagatcgcaccactgcactccagcctgggagacagagcaagatcttgtctcaaaaaaataaattcgggcccggtgtggtggctcatgcctgtaatcccagcattttgggaggccgagacaggcggatcacctgaggtggggagttccagaccagcctgaccaacatggagaaaccccgtcctactaaaaatagaagagtagctggtcgtggtggcacatgcctgtaatcccagctactctgcgaggctgaggcaggagactcgcttgaacccgggaggcagaggttgcagtgagccgagatcgtgccattgcactccagcctgggcaacaagagtgaaacactgtctcaaaataaataaataaatagatagataaaataaataaattaattaagataaaataaataaataataaaggtatgctggaagggagagagagaggaggtgtttgagagaaaggaggagagaaaaaaagtgaagagccccaggcgacaggcgtcgtgcagggtgcggttccacggtgtagtggagcatgcgacattcagggaacaagccaaactggacagtgagaacggaacactggcagcccagctacagtgggactcggatgggcagggcctgcggtgagactgtcaggcttcaagggacagagccagggacctcgaacctaacgtgtgttccccatcaggcagatgtgggtgagatgctctacatcccagagccccactcccctcttctccaaaatgggccttggctgggtgcagtggctcatgcctgtaatcacagcactttgggaggctgaggcaggtggatcacctgaggtcgggagttcaagaccagcctggtcaacatggcaaaaaccccatgtctactaaaaacacaataattagccgggctcattgctcacgcctgcaatcccagaactttgggaggccaaggcaggaggatcacttgagatcaggagttttgagatcagcctgaccaacatggcgaaaccctgtctctactaaaaatacaaaaattaggtcaggtgtggtggcttatgcctgtaatcccaacactttgggaggctgaggcgggcggatcacctgaggttaggagttcaaggccagcctggctaacatggtaaaaccccgtttctactaaaaatacaaaaaattagccaggcgtggtggcacatgcctgtaatcccagctactcgggtggctgaggcagaagaatcacttgaaccctggaggtggaggttgcagtgagctgagatggccattgcactccagcctgggcaacaagagcgaaactctgtctcaaaaaaaaaaaaaaattagcaaagcgtggtggtgtacacctgtaatcccagctactggggagggtgaggcaggagaattgcttgaaccccgggaggtaggggttgcagtgagccgagatcacaccattgtactgcagcctgggtgaaggagtgagactatgtctcaaaataaatacataaatagaaataaaaaatcatatgcatgtttatatggatttttattattattattttatttatagatcatagttttacttgttttgaggatatatgcaatatttatatagactttatttatttatttattttttgagacagagtctcacttcctcacccaatccagagtgcagtggcgcgatctcagctcattgcaaccactgcctcccaggttcaggcaattctcttgcctcagcctcccaagtagctgggattacaggcatgtaccaccatacccagctaatttttgtatttttagtagagatggggtttcaccat[138 bp omitted]aaaaaaaaagttaagcgggaactttccctatcagatctttttttaaaatataaaattttattaaaatagattttttgtggagacagggtcttgctatgttgcccaagctgattttgaactcccgggctcaagccattctcccgccttggcttcccaaagtggtaggattacaggggactgagccaccgcacccagcctcctatcggatcttaaaacctactttacagctactacaatgcaaatcatatgatatccactctgtgacctagcaattctgttcctagttatttgcccaagagaaatgagaacgccggttcccacaaagacaggaacaactgtggcagctttgggagtaatagcctgacctggaaaccgccgaggtgtccattaacagaggactggatcaacacattgtgaatttatttatgcagtggaattctactcagccgcaaatgggaacaagctctaatgtatacacagacacggaaaatgtcagaaacattatgctaggcaaaaacaaccaaaacaccaaagaacctcttgtgtaagatgacagttccagaacatgcaagactgggctgatgcaatctgtacggtgggggacgtagaggggtggcctctggggacagggcagggactgattgagacaagatgcaggctggggcgcaggcaccgtggctcacacttgtaatcccagcactttgggaggccgaggtgggtggatcacttgaggccaggagttcaagaccagcctgaccaacatggcgaaaccgcatctctactaaaaatacaaaaattagctgggcgtgttggcacatgcctgtaatcccagctactcgggaggctgaggcaggagaatcgtttgaacatgggaggcaaggttgcagtgagccaagttgatgccattgaactccagcctgggcaacagagacttcctctcaaaaaaaaaaaaaaacaaaagaagaggaagaagaagaagaagactgggctgaggtgggttgatcacgaagtcaggagatcgagaccatcctggccaacatggtgaatccccatctctactaaaatacacacaaaaaatgagccaagcgtggtggcaggtgcctgaagttccagctacttgggaggctgaggcaggggaatcgcttgaacccaggaggtggaggttgcagtgagccgagatagcaccactgcactccagcctggcgacagagcaagactctgtctcaaaaaataaaaataacaataaaaaataggtcgggtgcagtggctcacgcctgaaaccccagcactttgggaggccgaggcgggcggatcacgaggtccaaagatcgagaccagcctggctaacacggtgaaaccctgtctctactaaaaatacaaaaaattagctgggcgtggtggcaggtgcctgtagtcccagctacttgggaggctgaggaaggagaatcgcttgaacccaggaggcaaggttgcagtgagccgagatcacaccactgcactccagcctgggcaacagagcgagactccgtctcaaaaaaaaaaaaaaaaaaaaaaaagaaagaaaaaaagaggaacttacaagaacaatggaaagattaccccatgaacacccctatgcccaccaccactaaaatttggggttttttaaatttttaaaatttttttcttttttacagtgtccctttcaggatacacttaaattttattatatagtacttgttttatcacagatctttgcatccctctagccatctatcaatccttctgggtttgttgttgttgttgttttgagatggggtttcactctgttgcccaggctacagtgcaatggcttgatcttggctcactgcaacctctgccccccaggttcaagcgattcttctgcctcagcctcccgagtagctgggactacaggtgcgtgccaccacgcccggctaatttttgtatttttagtacagattgtgtttcactatattggtcaggctggtcttgaatgcctggactgatgatacacctgcctcagcctcccaaagtgctgggattacaggaataagccactgagcccagcctaatttttgttttttttagtagagacagggtttcgccatgttagacgggctggtctcaaacacctgacctcagatgacccgcctccgtaggcctcccaaagagctgggattacaggcatgagtcacggtgcccggcctaatccttacttttgatgcatttcaaagtaagttacagacatctgaatgtttcaccctaaacattccaggctgcatattattaactacttcagtatttgtttatgggggggtgtgtgtgtgtgtgtttgtgtgtatgtgtgagagagagagacagagagatggagagagagagagatggaatctccctctgtcacctaggctgaagtgcaatggctagatcttggctcactgcaacctccacctcccagattcaagcgattctcctgcctcagcctcccgagtagctgggattacaggtgtgcaccactacgcccggctaatttttgtatttttagtagagatggggtttcaccatgttggccaggctagtctcaaactcctgacctctggtgatctgcctgcctcggccttccaaagtgctgagattacagatgtgagccactgcacctagctagtggttttgtttgtttgtttgttttaatagaagtttacctacagtaaaccacacaaatctaaagtgtgctagttttttgtttgtttgtttgtttgtttttgagacaggatcttgccctgtcacctaagtggtacaaccacagttcactgaagcctcgacctccccagctcaggcaatccttccacctcagcctcccaagtagctgagaagacaggcacatgccaccacaccaggctattttttttttttttagacggagtctcactctgttacccaggctggagtgcaatggcatggtcttggctcactgcaacctccgcctcctgggttcaagtgattctcccacctcagcctcccaagtagctgggactacaggcgcacaccaccacacccagctattttcgtatttttagtagagacggggtttcactctgttggccaggctggtctcaaactcctggtgtcgaactcctgacctggtgatctgcctgccttggcctcccaaagtgctgggttacaggtgtgagccaccgcacctagcctaaatattttattgttatttgtagagacggagtctcactatgttgtctaggctggtctcaaactcctaggctcaagtgatcttcccactttgcttcccattttgggaggatttgggctcccaaaatgctgggatcacaggcacgagccaccgcacccaggctaaagtgtgctcattttgagaaatatatgtacggctgggcacaatggctcatgcctgtaaagccagcactttgggaggccaaggctggtgggttgcttgaggccaggagttcgagaccatcctggccaaaatggcaaaaccccatcattactaaaaatacaaaaattcgagggatgtgccaggcgtggtggctcacacctgtaattctagcattttgggagactgaggcgggtggattgcttgagctcgggagttccagaccagcctgggcaacatggtaaaaccccgtttttactaaaatataaaaaattagctgggcgtggcagtgtgctcctgtaatcccagctagtcaggaggctgagatgggagaatcacttgaacccgggaggcagaggttgcagtgagccaaaattgtgtcactgcactccggctttggtgacacagtgagactctgtcaaaaaaaaaaaaaattagagggacgtgttggcacacacctgtaatcccagcttcttgggaagttgagacatgagaatcacttgaacctgggaggtgctagttgcagtgagccgtgattgtgtcactgcactccaacctgggcgatagagcaagactctgttttaaaaaaaaagagagggagagggagagatgcagagatgcatgtataacccaagtccctgtcaagatgtaaactccttttgagtggctgaattccagcgtttttccaggtccagactcatttaccccgtcccctgttgtttctggcctctcttggaacatcattgccatgatcgccctgggatatatttcactgcgcgcttcctcaagggcatctgtctattccttatgtttctagggggtcaggttcattcggggatctggcaaatagaacacagtatttaaccaggcacggtggctcacacttgtaatcccagcactttgggaggctgaggcgggcagatcacgaggtcaggagtttgagaccagcctgaccaacatggagaaatcccgtctctactaaaaatacaaaaattagccaggcgtggtggtgcacgcctgtaatctcagctactcaggagtctgaggca[131 bp omitted]gaaggtaggaaggacatagcacagggaaaaattctgccacttcccagctctcctgctagtgaggaaggcagatttaaagaaggcaacagaccaggtgcggtggctcacgcctgtaaccccagcactctgggaggctgaagtgggagggtcgcttgagctgaggagttcaagaccaacctgagcaatgtggtgagactctatctctacaaaaaatgtaaacattagccaggtgtggtggtgtatgcctgtagtcccagctactcaggaggctaggctgaggcaggaaaatcacttgagcctaggagactgaggctgcagtaagctgtgaccgcatcactgcactccagcctgagcaacagagcaaggccctgtatccaaaaaataaaaataagcagggcacggtggcttatgcctgtaatcccagcactttgggaggccaaggcaggagaatcccacgagcccaggagttcaagaccagtctgggcaacatagcgagacccctgtctctacaaaaaatttaagaattagctgagtgtggtggcacacacctgtagtcccagctactggggaaactgaggtgggaggatcgtttgagcccaggagccggagggtggaggtcgagggtgcagtgagccaagatcaagccactgcattccagcctgtgcaacagagtgagactccatctcaaaaaaaaaaaaaaaaagtattaaaaagggccgcaaaggaggccagcaggatgcggagatgggcagtaatgtgcacggggtgggaggtctcttgctttagccaaggtggtcagggaagacccaagccctgaagacagagaaggagctggccttgaatcctgtaaatgttcccaaacgatctccctaagaggttatgccagtcacactcctgccaagagagtatctctgcgccacggccaagggtgagtcatcctgctgagaggttgagctggggacgcctgcccagatgggctccaagtgagggagagcctggcggggagaacagcccggacagaggcagggcagggcgccgggacactgcttggcgcgtcctgggagtgaagcgcattgaacccagctcaggctggtggtgggggagtcttggcaatgctctctctccaaaggcgagttgatcacagacgctggcagtgagtcagcggcaccgccagggctgctgagaaatccctcctgctgtccgatcgcattcctggaagggtgggccgctcagggccccccagctccagtcccactcaggccccagaatcccagcagcccaccactcacttctttgcgctcactcttccttctggtccccacacaccgctccctctctcgctaccttcagtctttgctcagatgtcgagttcccagaggggcctccctgacgccaccgttctagcagcatttagcatttagataaatgacaaattttagattaaatgttagataaattttaggctgggcgtggtggctcacgcctgtaatcccagcactttaggaggctgaggcaggcagatcacaaggtcaggagatcgagaccatcctgggtaacatggtgaaaccctgtctctactaaaaatacaaaaaattagcagggcgtggtggcgggcgcctgtagtcccagctactcaggaggc[136 bp omitted]atatatatatatatatatatatgataaattttagataaatttttatctaaaattgtaactcactggattcagtgacatctatctgtaatcccagcactttaggaggctgaggtgggaggatcgcttgagcccaggagttttctttcttttttttcttattttttaaagagattgggttctcactctgtgtagcccaggctggtcttgaactcctggcctcaagcagtcctcccatctaggcctcccaaagtgttgggattacaggcatgagccaccatgcctggcctcaagattggttttttgttctgagacacagactcactctgtcacccaggctggagtgcagtgacatgatcccagctcaccatgacctccgcctcccaggttaaagtgattctcctgcctcaggctcctgagtagctgggattataagcatgcgccaccacgcctggctaattttgtatttttagtagagatggggtttcgccatgttgccgaggctggtctcaaactcctgatgtcaagtgatccacctgtctcggcttcctaaagtgctgggattagaggcatgagccacctcgtcaagattgttaatcacatctgcaaagtccgtttggccatttgtggaacacagtctcagatttcaaggattaggacgacaacatcattggaggctgtgatttggccaaccacagtcacagagatggaattacacagagtttaccttccaagtctggctctttcactcagtgcaatgcctgggagagccttccctgtggctgtgggaaccgccggtttgttctttttttttttttttctgaggcggagtttcactcttgttgcccaggctggagtgcaatggcgcgatctgggctcactgcaacctccacctcccaggttcaagtgattctcctgcctcagcctcccaaaaagctgggattacaggcgtgcaccaccatacccagctaatttttgtattttattagagacggggtttcgccatgttggccaggctggtctcaaactcctgacctcaggtgatttgcctgcgtcagcctcccaaagtactgggattacaggcgtgagccaccgagcccggccagttctttttcatcgctgagtagtatcgcatggcacagaatactgctgtttatccacttacccatgcaaggacgtttgagctgttcccagggtttggcaattatgagtacagtggctataaacatgagtgtagatgagggtcaagtgtagatgttggtttgaacatataggcttccatttctcttggacaaacacccagaagggagagtgactctggtttttgctggtttttgttttccgtttttgtttttgttttttttttctgagacagagtctcactctgttccccaggctggagtgcagtggcgcgatctcggctcactgcaacctctgcctcccaggttcaagattctcctgcctg[168 bp omitted]gccaccacacctggcctattattatttttagagatgaggtcttgctttgtcacccaggctggagcacgcagtggtgagatcatagctccctgtagccttgaactctgggctcaagtgatcttcccacctcagcttcctgagcagctgtgactacaggtacaggccaccatgcctggctaatttatttatttatttatttatttattttgagatggagtttcgctctgtccccaggctggagtgcagtgatgtgatctcaggacactgcaacctctgcctcccgggttcaagcgattctcctgcctcagcctcccgagtagctgagattacaggcgcccaccaccgtgcccagctaatttttgtatttttagtagagatggggtttcaccatgttggccaggctggtcttgaactcctgacctcaggtgatccgcccacctcagcctcccaaagtgctgggattacaggcttgagccacagtgcccagcctgcccaggctggtcttgaattcctggcttcaagcgatcctcctgcctgggtccttcaataaatattgacaagcacctccctgctgccaggctctgctgagagtactttaggtacattggcaaacaagacagaacaataacaaaagaaaaaaacaccagatttttttaaattcccaggctcatggagcttacatgcaagcggagaagatggtcaataaaccatcaatgtcatatgtcaactgtagagtagctcaggagtgagtgacaggtgtgatggtaggcagagcaggggaagagggtgcagggggtctagctgtaaacaggatgctgtagggtagccctcatgataaggggtgacatttggaacaaagacttgaaaaaggtgaggacaagaggcatgaggcaccatgcccggctgcacttgtgtttaatgaaaactatgatggctgctgtgtgaccttaggggactatattaacctctctgggcctccatttcttggagcatgaagtggtcctttcactactcacttcctgaggttctgggagaagtctaggatcatgcatgttcttggcatagagtttctgtacgggtggctcccctcctggtgccaggccctttcctgggattggagggggatggacagagggaattcagaggtttaaggaggctgtggccccatctcctggggcaaggaggctattggtct[132 bp omitted]aaacctcgtctctactaaaaatacaaaaattagccaggcatggtggcatgcacctgtagtgctagctactagggaggctgaggcaggagaatagcttgaacccaggaaggcggaggttgcagtgagctgagatcacaccactacactatagcctgggcaacagagcaagactccatctcaaaaaaaattaaaaaaaagagggtgatatctgacctgtgtcgaggtggaaggaggagatgggaaaggcactcagagagtggaaaatgggcgtgcctggagctggtgtctgcagcaaggaggccagaggaggaggcactggcctaggctttgacctgagggcactgaggtgccacaggagggctgggagcagaggaggggcagcggagaagacctggaggaggctgagtcgagggcccacagggagaggagaaggcctgaggtgggcaggaatgcagggacagagaaggaaccaggacccagtagtccatggaggagggaggcaggagggctgggaagttgggcctttaagagttgcatgtctgctgggcacggtggctcatgcctggaattccagcactttgggaggctgaggcaggcagatcacctgaggtcaggagtttgagaccagcctggccaacatggtgaaaccctatgtctactaaaaatacaaaaatcagttgggcgtgacgacaggcacctgtagtcccagctaatcaggagtctgaggcaggagaatcgcttgaacttggaaggcggaggttgcagtgagccgagatcgtgtcactgtactccagcctggtgacagagcaggactccatctcaaaaaaaaaaaaaaaaaaatttacatgtccagggggcttgcaggcagaaccattcaccctccaggaggctgagtcattcccggggatcacctgcctgctgtggccacccacccggaggagctctgtctgctgtccctgtccctggcctctcgctggcttaattgtccctttcattcctccactcaaatcgagcgatatcagcacgccaggccctggacgtgttttgtgggaacaaacaggcctgtttgtctacgtcccaggcgtagagaagttcgtcccggggccagatttgttttacaaggtggacagcaggcacagggtacctgttttaggaatgcgagaatgcagccacgtaggcatgtgggtgggggacaggggggtcctggctctgcgctcaggcccagagagtggcagggtcgggggacatttccaggagcgggaacagcagctccaggggcccagaggtaggactactgctcggtgcatttggaggtcttggctggactgtggcgttcatggggaaggagggactgagtctacagggctgagaggccaccacagcttgggttcaaatcccagctctgttcagctcttgtgtggccacagtcaaatcgcttccctccttgaagctccatgtcctctctgtagcaatggaagctacagcggagcccaattctaccccacccactgcacgacaattggtttgtttctatgtttgttactagagtcagggtctcactctgtcacccaggctggagtgcagtggcgcaatctcagctcactgcagcctcaaactcctggctcaattgatcctcccgcctcagactcccaagtagctgggactacacgtgtatgctaccacagtcggctaattttttatttttaaacagagacagtgttctcgctatgttgctcatgctggtctcgaactcctggcctcaagtaatcctcctgtcttggcctcccaaagtgctgggactacaggtgcaagccactgcgcccagcccttgaggagttttcaaagtatccacagcacccaaggctgagaactgctacagcagctgaaagccataagtgtctttgactttccttttgtcctggtaaaccccttcattccttccttccttccttcctacactcattcaatcaaacactggttgaacaccaacaagtcccagcactgtgggctccaccctggcctctggggagtgggggagggacccccgatttggagattgtaggtgccaagaggaacgggcaagatgccctcctattcattcatttattccttcagggcctctccaagggcacagggtcttttcttgttggcatctgggttttcctctcctgtaagctgggaaggagatttctccctcaaggagctgttggccagatcaaagactaaaataatgctaaacagagcttccgtttcctgataaatgtatcaggagccaagcacttaaaatatattatcccgttgaatccccaagtaggattaaaacctcaaagcagagattgctcttatcctcacatgacagatgaggaaactgaggatcaaagaagtgaagtccgctgcccaaggcacagaaaggacaagtaggacctatggaagcccagccaaggcccagcaggcgctcagtggctaatcctcctgaaaactaattacctcactgcgcctgcccactggactaaatttgcctggtaaccgatgacatcatcactaattccgcgcccacgctcaacctatgggataactgatgacatcactgaacaaacaaagtaactgcagtttattgaaggcctactgtgtgcgcaaggctgtgctaggcaggcctcctctgagttcacataaggccccgtggtgcctgctactgcatgaaatagccataataattt[146 bp omitted]tcttggattcaagcaattatcctgcctcagcctcccgagtagctgggattgcaggtgcccaccaccacacctggctaatttttgtttttgtttttgagatgaagtctcactctgttgcccaagctggagtgcagtggcgcgatctcagctcactgaaacctccacctcctgacctcgtgatccacccgccttgacctcccaaagtgctgggacaacaggtgtgagccaccgcgcctgggatctttattaactttttaaaattaaaaatatatatatatatatatttatatatattttgagatggagtttcactcttgtcgcccaaactggagtgcaatggtgccgtgatctcggctcactgcaacctccgcctcctgggttcaaacgattctcctgcctcagcctccggagtaactgggagtacaggcatgcgccaccacgcctggctgatttttgtctttttagtaggggcggggtttcaccatgttggccaggctggtctcaaactcctgacctcaggtgatccacccacctctgtctcccaaagtgctgggattacaggagtgtgccactgcgcctgaccagctttataaagtttatagggacagtgtcaccactttacagaagagggactgaggctctgaggaggaagttccttgccagggtccgagtgtcgccaccctgagaactccagcacccacctccctactctccctcatggcgtctcccccacctttccacagccagaagttgccaggtgaatacttccggtacaagggcgtccccttccccgtcggcctgtactcgctcgagagcatcagcttggcggagaacacccaagatgtgcgggacgacgacatctttatcatcacctaccccaagtcaggtacctgccgggctgcgggcgtcgggggctggggagagtggggagggggtgcggcagaggacaggaaaggcacatagagaaggaggggaggaggaaaagtggggccgggtctgttcagagcggtgcccctgccagaagtagcctcccagggatacccacccggtgcccagcctctcccctccaggtcagttctcaacacttcaccttccctgacctccctggctgaaatagcgtcctcgttctgttcctccctttcccctttaccctctacttctcttttttttttttttttttgtagagatggggtctcgctac[132 bp omitted]tctgtcactcaggctggggtgcagtggtgcaatatcagctcatcaaacctcccaccttggcctcccaaagtgctgggactacaggtgctggtcaccaccaaattgtatactttttttttttttttttttttggaggtcttgctctgctgcccaggcttcagtgtgatggtacaatctcggctcatttcagccttgacctcctggactcacatgatccgcccaacctcagcctcctgagtagctggaaccacacgtgtgcaccaccatgcctggctaacttttgtgttttttgtagggacagggtttcatcatgttgcccaggctggtcttgaactcctgggctcaagcgatcttcctgcctcagcctcccaaagtgctgggattacaggcatgagccaccgcgcctggctaaattgtatactttaaagtggtgaattacacacaatttgagtgtttgagtttgagaccaacctgggcaaaatggcaaacccccctctatttttttttttttttttttttttttgtgacggagtctctctgtcgcccaggctggagtatagtggcatgatctcagctcactgtaacctctgcctcctgggttcaagcaattctctgcctcagcctcctgagtagctgggatcacaggtgcccgccaccatgcgcggctacttctttttattttattttattttatttttgtatttttagtagagacagggtttcaccatcttggccaggctggtcttgaactcctgacctcatgatccaccagccttggcctcccaaagtgttgggattacaggtgtgagccactgagccgtcttttttttttttttttttttttttttttttagagacagagtcttgctctgttgcccgggctggagtgcagtggcgtgatctcggctcactgcaatctctgcctcctgggttcaagcgattctcctgcctcagcctcctgagtagctgggattacaggcgtgtgccactacacccagctaatttttgtatttttagtagagatgaggtttcaccgtactggccaggatggtcttgatctcttgacctcttgatctgcccacctcggcctcccaaagtgctgcgattacaggtgtgagcccggtcaataagtagcatttaaatgaccaaagggaaataacaaaaactcttccttcccttttttctcctctcttccccacctcctccaacaagtatttattaaacacatattatgtgccaggcagtgttctaagtacaaagaaggctgcaactctccagacagactgaaatgtctccctttatggagctcacattgtactggggcaacccagaaaataaatcaacaaataaaaatatgacactatgattggtggcaataaatgctgtgaagaaaagtagagggtaggcggggcatagtggctcatgcctgtaatctcagcactttgggaggctgaagtaggaggatcacttgaggccaagagttcaagcccagcctgggcaacatagcaagaccccatctctaaaaaaaaaaaattagccaggcgtggtggtgtgcgcctgtagtcccagccacttgggaggctgaggcaggaggatcactttagctagagaggtcgaggctccagtgagctgcgatcacaccactgcacttcagcctgggcaacagagtgagaccctgtctcaacaaatagaaaaaggtacaattcaatgactttgccatgtgcgtggagctggtcatccatcaccacaatcaattttagaatattttcagccgagcacagtggctcacacccataatcccaacattttgggaggccgaggcaggaggatctcttgagcctaggcgttcgagagcagcctggccaacatggtgagacctcatctctacaaaacatacaaaaattagccaggcacgatagtgtatgcctgtagttccagctacttgggaggctgagatgcgaggattgcttcagtctgggaggtggaggttgcagtgagacgcgttcaccccaccgcactccagcttgggtggcagagactgtctcaaaaacaaaaaactgagtgggccaggcacggtggctcatgcctgcaatcccagcagtttgggaggctgaggcgggtggatcatttgaggtcaggagttcgagaccagtctggccaacatggtgaaaccccgtgtctactaaaaatgcaaaaactatccaggcgtggtggtgcgtgcctgtaatcccagtattcggcaggctgaggcaggagaattgcttggaaccggggggtagaggttgcagtgagccaagagtgcaccactgaactccagccttggcgatagggcaagaccctgtctcaaaaaccaaaaacaaataaaaataaaaataaagaacattatcatcatccaacaagaaactctggacctataagccatcacctcccaatcctcatatcccctcccccctgggccctggtaaccaccaatctccgttctgtttctatggatttttctattttgggcatttcatggaaatggaatctacactatgtggcctcttgtgtctggtttcttcctgagcatcacgttgtcaaggttcaaccacattgtagcatgtgtcagagtctcattcatttttatggtccaataatattttatgttatgtataaactatattttatttattcatcagttgataagcatttggattatttccactctggggcttattatgaatgaa[138 bp omitted]gcctc[134 bp omitted]ggcctcccaaagtgctgggattacaggcacgagccaccgcgcccggcctttttcttttcttttctttctttcttttttttttttttttttgagacgaagtctcgctcttgtcccccaggctggaatgcaatggcgcagtctcggctcactgcaacctctgcctcctaggttcaagcgattctcctgcctc[134 bp omitted]cagcttcccgaagtgctgggattacaggcgtgagccactgctctcggccttgcatgcaagttcttgtttctatttttattttttgaggcagggtctcgatctttcgctcaggctggagtgcagtggtgcagtctcagctcactgcagccttgacctcctgggctcaagctatcctcccacctgagcctcctgagtagctgggacgacaagtgcacaccaccacgcccagctaattaaaaaaactttttttttttttcacagacgagatctcactgtgttgcccagactggtttcaaactcccgagctcaagcaattctccctccttggcctcccaaagtgttaggattataggagtgagcctctgcactgggccctgcacacaagttcttacgtggacatatgttttctttgttttttatggagacaggttctcactgttgcccaggctggagtgcagtggcgagatctctgttcactgcaacctctgcctccacaggttcaaacaattctcctgcctc[134 bp omitted]cagcctcccaaagtgctgggattataggcgtgagccaccgtgccagcccgaagtggctttatcttttttcattcttcccagcaatagatgatcctctattgccccacatcttctccagtgattagcatcaacagagatttacttattggagacaaggtcttgctcggttgcccaggctgaagtgtagtgggaagatcatggctcactgcaacctcgaactcctgggcacaagtgatgctcccaccccagcctccctaatagccaccacacccagctaatttttgtagcgataagggtctctggttggtctcgaatgcctgggctcaagcgatcttcctgcctcagcctcccaaagtgctgggattacaggcatgagccactgtgcctggccagtttttttctaaagctattttgataggtgcctactggtgtttcactgtagtattaatttgcatttccctaacagctaatggtgtttgagcatcttttcatgtgctcattagccatcatatatattccttttttttttttttttttttttttgagatggagtttcactcttatttcccaggctggagtgcaatggcgcgatctcagctcactgtaacctccacctcccaggttcaagtgattctcctgcctcagcctccctagtagctgggattacaggcatgtgccaccatgcctggtttttgcattttttttttttttttagtagatcgggggtttctc[131 bp omitted]gccactgacttgaagctcacaaatgtattatttggtaaagtgttgaaat[137 bp omitted]ccattctcctgcctc[223 bp omitted]tacttgttttgcaaatattttctcccaatctatggcttgtcttttcattttcatatcagcgtcttctcagagtatgttttattattattattatattattattattattattattattattattagagatgaagtctcgctctgtcgcccaggctggagtgtagtggtgccatcttggcttactgcaacctccgcctcctgggttcaagcgattctcctgcctcaacctcccgagtagctgggattacaggtgcccgccaccatgcctggctaatttttgaattattagtagagacggggttttgccatgtgggccaggctggtctcgaacccctgacctcaggagatccacctgcctcggcctcccaaagtgcagggattacaggcgtgagccactgtgaccagccttgattttgcttatgtttttctttctccttataccttgacattgtcccatcttggaactttaaacaaataagtttctggtttttttaaatagttccgtggtatttcataacataggatatacaataattcttgcttaaccagtttcctagtgactgatattaatgttcaatcttttgcctatgtatatacaatgtaaactttaaacacaatgccttgtacatgcagtacttggcattgaacacacttacctctaggacaaatatctggacaaagaattgcttggtcagagtctgtacatttgtaattttgatatgtaatggctacatttccctctatagaaattgtggaagcttgttctctgagccgggggtgtggttaacacctgaaatcccagcactttgggaggtcgaggcaggcggatcacttgaggccagcaataggagaccagactggcctacatgaccccatatctactaaaaatacaaaaattagctgggcatggtggtgcgcgcctgtggtcccaactactcggaaggctgaggcatgagaattgcttgaactggggaggcagaggttgtagtgagccaagatcgtaccaatgcactccagtctgggcaacagagcgagaccctgtctcaaaataaaatgaaaaaagaattatttgcagtcaggcacggtggctcatgcctgtaatcccagcactttgggaggccaaggcaagtggatagcttaagcccaggagttcaagaccagcctgggcaacatggcaaaatcctatctctacaaaaaaaaaaaattagccaggcgtggtcgtgcatgcctgtagtcccagctacttgggaggctgaggcaggagaatcgcttgaaccctggaggtggaggttgcagtgagccgagatcactccattgcactccagcctaggcaacaagagcaaaactctgtctcaaaaataaaaaataaaagaaaaaacagaagaaaataccaagtgtggcaaggatgttgagaaaatggggcccttgtgcactgttggtgagcatgtagaatggtacagctgctatggaaaacagtttggcagttcctcaaaaaattaaagatagaattaccatattaactcagcagttccacttccaggaatatgcccaaaagaactaaatactaggtgggggcactctgacagatatttgtacaccaatgttcatagccacattatttgcaatgaccaaaagctgaaactatccaaatatctgccgttcatgaatgaatggataaacaaattatgctatattcatacaatggaatattattcagctgtaaaaaggaaggaaattcgtccgggtgcagtggctcatgcctgtaatcccagcactctgggaggccgaggcgggcggatcacctgaggtcaggagttcaagaccagcctggccaaaatggccaaaccccgtctctactaaaaatacaaaaattagccgggcctggtggtgcgcgcctgtagtcccagctgcttgggaagctgagg[132 bp omitted]tgtaatcccagcactttgggaggctgaggcaggcagatcacgaggtgaagagattgagatcatcctgaccaacatggtgaaaccctgtctctactaaaaatacaaaaattagctgggcatgctggcgtgcgcctgtagtcacagctattcgggaagctgaggcaggagaatcacttgaacccgggaggtggaggttgcagtgagctgagatcgcgccactgcactccagcctggaaacacagcaagactccgtctcaaacaaacaaaaaacaccacacacaggaatagctaaaatagggtgcagccacttcctctagggctgaagccaaactcccaagaaagaaagaaattgggaagaaggacttccctgcccaaccggctccccacacaagattagagtttcgctgcagaggtatggtcatgacccactgggtgactgagaagttcactgaagtgcaacaggccactgaaatttgctagggggaggggtaaacgtcactgcgtgtctagtgcagggctggcccctgtccatcacaagatcccgctaagaggagctcgtgagaatcaggaagagccccatcctcattcagtgttcctccagcgccctctgctgacaaggtttaacactgagctagctggcagaggagaaatgtttacagggtccagctccaatatcacaaaaacggcagagaggcatgaagttggagccaccagcctgtaaactgataactggtacaaggtggttgttagaatgaaatccagtgaatggattggatgtggtggcttacgcctgtaatcccagcactttgggaggccaaggcaggaggatcgctagaggccaggagctccagaccagcctgggcaacacagtgagaccccatctctacaaaaattttaaaaattaggtgggcgcaggctgggcatggtggctcatgcctataatcccagcactttgggaggccaaggcaggtggatcacctgaggtcaggagtttgagaccaacctggccaacatggcaaaaccccatctctactaaaaatacaaaaactagccaggcgtggtggcacacttctagtcccagctacttgggaggctgaggcaggagaattgcttgaatccaggaggcagaggtttcagtgagccgagatagagccactgcactccagcctgggcaacagagtgagactccttctcaaaaaaaaaaaaaaaaaaaaaaaagctgggtacatgtggtctagctactccagaggctgaggtgggaggatcacttgagcctgggagttggaggctgaagctgaagtaagctgtgactgcaacagtgcacaccagcccaggtcacagagcggaatcctgtctcaaaaagaattaaatgcaatgaatactaacagaaagtaattttgaacgtaattgtttctcttctgaacagcctgtggtctcctgaaattcaaaactgtgaattgggtccttgatgaggtccctttccactaggtaacattctgtggctccccacagaaataaagaggtgaacctcagccgggcgcagtggcttactcctgtaatcccagcactttgggaggctgaggcaggtggatcactggaggtcaagagttcgagaccagcctggctaacatggtgaaatcccatctctactaaaaataccaaaaattagccaggcgtggtggtgcatgcctgtaaccccagctactagggaggctgaggcaggagaatcacttgaaaccgggaggcggaggttgcagtgagccaagatcgcgccattgcactccagcttgggcaacaagagcaaaactccgtctcaaaaagaaaaaaagtgggggtaggggggagggatagcattaggagatatacctaatgttaaatgatgagttaatgggtgcagcacaccaacatggcacatgtatacatatgtaactaacctgcacgttgtgcacatgtaccctaaaacttaaagtataataaaaaaaggggtgaccctcaaaagtgggcagtgaaaagtgaaaagagcagagatttttatgtccagacacctgggttcaattccagctttctccatgtattaaaggagtgcctgctgggcatgatgcctctgctcccagcaccttgggaggctgaggcaggaggattgcttgagcccaggagttcaagaccagcctgggcaacatagtgggaccgtatgtcttctaaaaataaaaataagaaattagccaggtgtggttgtgtgcacctgtggtctcagctactcgggaggctgaggcaggaggatctcttaagcccgggatttcaaggctgcagtgagctgtgatcacaccactgcactccagcctgggtgacagagcaagattctgtccccaaaaaaataaataagtaaagcaattctggctgtactaatagatcagcctcagaatttcagcggctgaagccaagtttgtttctttttcctataaactgtagttggtgcaggaagggtggaaggaagttggtggggggatatccatgcattcccagacatttggttccttccatcttatggctctgccatccccgggagtcccagattctcccctggagtctctgtatccagaagcagagagggagtggagagtcacgtggcgtgcgtttatgggccaggcctggaaatagccgcacatcacatcgccgccacctatacttccttggccagacccagtctcttggccccacacatagcagcaggggagaagagaaaaggtcatcacgccatattcccagcagaaaaatgaaatggggttgggtggacagctcaccagtctctgccctgcaccactttcctagctttgtccccttggacgagcgacatggtttctgtaaggctcagtttctggctccgaaaatgaggttaagcaaccttgccttctctgccagctgtaaggaatcagtgtgataaaataggtggtaaattgctcaataaatgctgtcaggcagggcgtggtggctcacagctgtaatcccagcagtttgggaggccgaggtgggcagagcacctgaggtcaggagttcgagaccagcctggccaacatggggagacctcgtctctactaaaaatacaaaattagccaggcgtggtggtgggcgcttgtaatgctagctactcggctgaggctgaggcaggagaattgcttgagcctgggaggtggaggttgcagtgagccgagatcgcgccattgcactccagcgtgggcaacagagtaagactctgtcttaaaaaaaaataataaaaggtggcaaattgctcaataagtgctgttgtgattattctgatgatatctccctcttcagccctcccacacccaattaatctgctcgatttctcccaacaggcacgacctggatgatcgagatcatctgcttaatcctgaaggaaggggatccatcctggatccgctccgtgcccatctgggagcgggcaccctggtgtgagaccattgtgggtgccttcagcctcccggaccagtacagcccccgcctcatgagctcccatcttcccatccagatcttcaccaaggccttcttcagctccaaggccaaggttgggaggaggggtgtgtgtcagttgggaggggctgcatgggtgtatggggtaatggggggacggagcataactcattgattcattcagcacctatttgttaaacacctactatgtgcctgactctgatctagcacagtggtcaatatacacacagaaatgcctgccctttggcagggagtgatggctcatgcctgtagtcccagcactttgggaggctgaggcgggaggatcactttgggccaggagtttgagaccagcttgggcaacatagtcagaccacatcattacaagaaattttaaaaatcagtcagacgtggtggcacacacttgtagtcccagctacttggaatgctgaggtgggaggatcacttgagcccagcaggtcaaggctgc[191 bp omitted]catggtgaaaccatgtctctactaaaaatacaaaaattagtcggatctggtggtgggtgcctgtaatcccagctactcaggaggctaaggcaggagaattgctggaacctgggaggtggaggttgcagtgagctgagatggcaccactgcactccagcctgggagacagaccaagatttcatctcaaaaaaaaaaaaaaaaattacagccaggcgcagtggctcacgtttgtactcccagcactttgggaagccaaggtgggcagatcacctgaggtcaggagtttgagaccatcctgaccaacatggagaaaacctgtctctactaaaaatacaaagttagctgggcgtggtggcacatgcctgtaatcccagctacttgggaggctgaggcaggagaatcgcttgaacccaggaggcggaggttgtggtgagccgagatcgcgccattgcactccagcctgggcaacaaaagcaaaactccgtctcaaaaaaaaaacccccatatattatactacatattataataatttaatagtattacaatatactttaattatatttaatatttatatgtttaacatataataacataatgcaatataatataatacataaaatgtctgatgggataaatttacattggggggagagggctggagatagagttagaggtgggtgtggggctgcaattataaataaggaggtcaagggggcccccagtgagtaaaaacccgggaggtgatggtgggagccacagaggtttctagaggaagagcatttcaggcaagagggaaaagcaggtgcaaaggccctgaggtgggtgtatctgaggtgcaagagggaggtcggtgtggccggagccaagtgagcaagtggggaaaggagtggagatgaggtccgggtggggaggcaacaggggccaaaatgtgcagggccgcgtgggcccggtgcggacttgagctctgaccgagtgacgaggcagcgcggcagggatcgcagcagaggaggagcccgagcgggcttaggcttcaccggcgccctctggcggtcagatggggaccgactgtcgagagagcagaagccgggaagcccgagaggcggcgctggccggggtccaggggaggggacggtggctggactagggtgatggtcacggaggtattttgaaggtgagaccgggaggatttgctgacagactggatgtgggtgtgagagaaggggatgagtcaagggtgactccaaggtttcggcggaagcaactgtcagggtggggcaactgggaaggggaggagggaggggagcaggcgggggaggaagacacgggctctgcggcggcccatcccacgtccagcagaggctgccggtgggcacagaaatgcacccatcgggatctgaggggagagacttgggctgacacgtccatttgcaattccttggcacatatattctgtaattaatcgaagctccaggactgggtgatatcgccaaggaattgagcgtggacagagcagagagggggggctgcaatcaggaagtccccaagaccaccctcaggctcaacgacttagcaaaactcatagtgttcagcaaagctgctggactcccgggttatagtcaattacaatgaaagcaaacgtgaaaatcaggcaagggggccgggcgcggtggctcacgcctgaaatcccagcactttcagaggccaaggtgagcagttgattgagcccaggagttcaagaccagctgggcaacttagaaacacccatctctacaaaaaagtttaaaaattcgtcacgtgtagtggcatacacctgtagtcccagctacttgggaggctgaggtaggaagatcacttgagcctgggagtttcaggctgcagtgagccatgattgtgccacaggcactccagcctcaaggacagaacaagaccttgtttcttttcttttttctttttctttcttttttctttttttgagacagagtttccctcttgttgcccaggctggagtgcaatggcacgatcttggctcactgcaacctctgcccctctgcctccagggttcaagcgattctcttgcctcagcctcccaaatagctgggattacaggcgcccaccaccatgcccagctaattttttgtattttcagtagagacggggtttcaccatgttgaccaggctggtctcgaacacctgacctcaggtgatccacccgccttagcctcccaaagtgttgggattacaggtgtgagccacagtgcctggccgacaagaccttgtttctaaaaaataagactaggctgggcatggtggctcatgcctgtaatcccagcacttggggaggccgaagcagatggatcacttgaggccgggagtttgagaccagcctggccaacatggtgaaaacccgtctctactaaaaatacaaaaattagccaggcatggtggcacccacctgtagtcccagctactcgggaggctgaggcaggagaattgcttgaacctgggaggcagaggttgcagtgagctgagatcgtgccactgcactccagcctgggagacacagcgagacttcgtctaaaacaaaacaaaacaaaacaaaaaaatccaagggattaggaaatacctctcaggacctaggggcaagggccaggcctttctctgggcagaaaggaatcctctacagcacaggaatcaggaaggagccctggaaagcaccaatgttattacaagacctcacaccagcagccacgtttctctaagtctgttttcatttagtttttggtggatctgggggtgttttgttttgttttttggtttatttgtttttgaggcagggtctcgttctgtcatgtaggctggagtgcagtggtgtgatcacagctcactgcagcctcgacctcccgggctcaagtgatcctcctgccttagcctcccgagtagctgggaccacgggcacgcaccaccacatcagctaatttttgtattctttgtagaatgggggtctcattatgttgtccaggctggtctcaaactcctgggttcaagttatcctcctgtctcgtcctcccaaagtgctgggattacagacatgagccaccgcagctggccaagtgttctttctcagcctccctccctttatgcctttgtcattccctcaagcaatttccagaacctcctgtgtgtggggctctgggctaaggctctaggaacgtgtaagaccttgcctgtcctcaaggggttcctcaatctgtgagtaaccaacatggtaaaaccccatctctactaaacatacaaaaattatcctgatgtggtggcacgctcctgtagtcccagctactcaggaggctgacacaggagaatcgcctgaacccaggaggcagaggttgcaatgagctgagatggcgccactgcactccagcctgggcgaaacagagtcagactccatcgcaaaaaaaaaagagtctgccctgagtccttcctgcttcagggtcagaagagaggggtctccagggcaggaggcctcaggggctggggtcttgcctgtgtctgacgccttctcccctctcctcaccatccgcacacaggtgatctacatgggccgcaacccccgggacgttgtggtctccctctatcattactccaagatcgccgggcagttaaaggacccgggcacacccgaccagttcctgagggacttcctcaaaggcgaaggtggggacagggtaaagcggggcaggaggggtggggaggagccccagaggaccctgatgggcagagggacagaggaggggtaagaaagggagagagacagagacacagggcatcaaaaggggcaatagagacagagagcaggtggccaggagaagagacggagggagagaggctgagagaccgaaagacacaggacaggcaaaggacagaggagacagagacagggagagacacagatacaaaaagactgagagagagggcaacaaaagagacaggggcccggcatggtggctcatgcgtgtaatcccagcactttgggaggc[135 bp omitted]agacaggagaatggcttgaacttgggaggtggagcttgcagtgagccaagatcgtgccactgcactccagcctgggcgacagagtgagactccgtctcaaaaaaaataaaaaataaaaagagataaggaaataaatgcagaaagagagatggagtcagagagagacagggagagacaaggaaacaggaggagacaggcccctggtactaagaaaggcagcgccctttggccacgtgttcctttctctgctgctgtcagagaccctggctttggagggaaatccaggtgtgtggaggcggactggatggacagatagacaaaggccccccaagatgggcaaccaggggagaagcaggttggaagagccccagaacttggtggaaatgtgggggctctgggggagggcatccagctctgggggctggacctgggggtttgtggggcacagctagttagacccatgagccccagtggggctgggggaaccccgccactcagccctcaccccacttgtccctctgcccacagtgcagtttggctcctggttcgaccacattaagggctggcttcggatgaagggcaaagacaacttcctatttatcacctacgaggagctgcagcaggtgagtccccacctcctccaggtgcagcgtcccccccataccctctgctcacaccccacactctccccttcccgagggtctcaggacccctccgcttccccatgcaatgcgccagcccctggggatactgcaggaacagaacagaggccctgagcctgtgagcaagaccacagacaaaatccctaaaccacacagcaggctggcggggcagaggagctgaggagcaaaggcgagtgggaaggaagataaggaatggtcaggggcgagatttaacccaggagggttggccggacacagtggtagtggctcacacctgtaatcctaatgctttgggagcctgaggcgggaggaccccttgagcccaagaggtcaaggccacaatgagctatgatggtgccactgtactccggcctgggcagcagagcaaaaccctgtctcaaaagagagagagaaggccaggtgtggtggttcacacctgtaatcccagcactttgggagcccaaggcaggtggatcacttcaggtcaggagttcaagaccagcctggccaacatggtgaaaccccatctctactaaaaatacaaaaattagccgggcacagtggcacatgcctgtagtcccagctgctcaggaggctaaggcaggagaatggcttgaacctgggaggtggaggttgcagtgggctgagatcacaccactgcactccagcctgggcgacagagcaagaccttgttccaaaaaatagaaagaaaaaagattgaaccacatgaaatgcctgcattcaaccagtttttatttatttttatttattttatttaattaatttatttatttttgagacagagtttcgctcttgtggcccaggatggagtgcaatggcatgatctcggctcaccgcaacctccaactcccacgttcaagcaattctcctgcctcagcctcccaagcagctgggattacaggcatgcgccaccacgcccggctaattttgcatttttagtagagacggggtttctccatgttggtcaggctggtcttgaactcctgacctcaggtgatccacccacctcggcctcccaaagtttttatatttggaccagttatatatttatataactggtcggccccgccaactagtttttattttaagatggtaattttggctgggcacggtggctcacgcctgtaatcccaacactttgggaggccgaggtaggcagatcacctgagctcaggagttccagaccagccttgccaacatggtgaaaccccgtctctgctaaaaatacaaaaaaattaggcggccatggtggcgggcgcctgtagccccagctactcgggaggctgaggcaggagaatcgcttgaacctgggagctggaggttgcggtgagccaagatcgcaccattgcactccagctgggttatagagcaagactctgtctccagaaaaacaaaaacaaaaacaaaaaggtaattttatatggttttcccaaatgttgttattatccctattttatcgacgaggaaactggaggtttgtaacttaagagagggttgataatttgcccagggcacatggctcttgcctgcagactccatgtttattttttcccaacctggtaactttcttttaatggaaagctccagaagaggtgtcggtgctactcctccccctcttttccagcaagcattcttctccaaacccagaactgggccacagagcctaacagcttctgggctgcccctgggtgtgaggcgccgcccacatgttagaatttctgggacacgtcagtggttcaagaaggtaaagagaaggaaggttatgaaaccaggagtgacctggaaaatcggagccatggggttggcggagctgaccagagggctgaccat[133 bp omitted]gaaatcctgtctctattaaaaatacaaaaattagccaggcatggtggtgcatgcctataatcccagcagctactttggaggctgaggcaggagaatcactggaacccaggaggtggaggttgcagtaagctgagatagcaccactgcactccagcctgggtgacagagccaggcttagtctcattgtaatcccagcactttgggaggccgaagtgagcagatcacccgagggtgggagttcgagactaccctgaccaacatggagaaaccctgtctttactaaaaatacaaaattagccaggcgtggtggcacatgcctgtaatcccagctactcgggaagctgaggcaggagaatcgcttgaacccgggaggcagaggttgcggtgagacgagatcatgccattgcactccagcctggacaaaaagagcgaaactccgtctaaaaaaaaaaaggcagaggggcacaggggaggactaagggctccagggacctgagctcctctctggctgtgtggccttggacaagtgtctctccctctctgggcctctgtttaccaattgagataatgacacttcccttgcaaagctgatggtgggatcggcacaaatgtatggggggcttggatcagagcttggtacatagtagacactcagaaaggaaggtgatatttgagctgcagccgtggcaatgggcccttctggaagccccatgccaaggcccagagggaggaatgtgtagggaatggtgagtcccagaaggagagggtgggaaaggtattggaagagctgtgaccagaccacatctgttttttgggtttttttttgttgtttttttttttttttttgagatggagtctcactctgccacccaggctgtagtatagtggtgagatctcggctcactgcaaactccacctcccagttcaaacgattctcctgcctcagtctcccgagcacctgggattacaggtgcccgccaccacacccagctaatttttgtattgttagtagaaacagggttttaccatgttggccagactggtctcgaactcccgacacctgtctcagcctcccaaagtgctgggattacagacatgagccactgcacctgccccacatctgtgcttgaaagccgggtctgggtctgggactgtgtcccagggcactcgggagccacggaagagttgggagccagtgaggagcagggtcagctggggtgtgggggatgagctggagggggatggagactggaggcaggaaggctgtggagcagccggctgctgaggcatggatccaggaaggggaggatgaggcctaagcagttctaggctacagggacacagaggaggggatatggcaaggggaggcaggtggggagggacagggctcatgatggacaggttttgggggtgaggggtacccagagagggaggccaggctcctgggtggatggtggggccatcctgcaatgggggcctgggggaggagcaggtttgagatgtagaccagccaatgcctgtctctaacctgaaggagggtgattccaggtaaggtgatgcactgacctctgcccccggatgtgacctctgccccccactgtgacctctgcccccggctgtgacctctgccccctgctgtgacctctgccccctgctgtgacctctgccccaagcccacctattccctcccacctagagaaccctccaaagacagaaactgcaaaaacccttagaggcgatatagcccaacccctcagtttggagttggggaaactgaggcaaagaggcagcgtccctcaggcagccccaggttaggacccagacatgcggatcccaggttccacgctccttccttggccgagtgccctccctccgctgacccctctcccctgcctgcaggacttacagggctccgtggagcgcatctgtgggttcctgggccgtccgctgggcaaggaggcactgggctccgtcgtggcacactcaaccttcagcgccatgaaggccaacaccatgtccaactacacgctgctgcctcccagcctgctggaccaccgtcgcggggccttcctccggaaaggtgcgggggttctggggttcagagcccactaggccactgcccggctgtgtgacctgggagagttacttaacctctctgggcctcagtttctcacccagctgtaacattgggtgaacagggtcactgtggccccagggttgatcacgcacggggcttagcactgactcagcacacgtgccagccacccgaggcgtccccatccagagaactcccaacgacagcaaaacatccaggagtactgccaacgccaggtttacccgagagagatttagagtcttcatgagtcctcctcgacggccatgttcacggcagaaatactcaagccctgggttacggggcgcaggcggtagcatagttgtttcctcttcctgctgtaacaaaaacaccgcaaactccatgactcaaaacacgtttactcttttttttttttttttttttgaaagagtctcgctctgtcgcccaggctggctggaggttgcagtggcgcgatctcggctcactgcgacctccacctcccaggttcaagtgattctccttcctcagcatccttaagtagctgagactacaggcacctgaaaccatgtcaggttaatttttgtatttttagta[156 bp omitted]ccaggctggagtgcaatggcgcgatctcggctcactgcaacctccgcctcccaggttcaagcaattctcctgcctcagcctcccaagtagctgtgactataggcacccaccaccacgcctggctaattttttgtatttctagtagagacaggttttcaccgtgttagccaggatggtctcgatctcctgaccacccgcctcttcctcccaaagtgctgggattataggtgtgagccactgcgcccggccaagtgaagcatcttctaatctctgaccctcctcccttctatagggacccaggtgatgacactgagcccacccagatacttcagggtcctctccccatctccagatctttagcttaatcctatctgcaaaatcccttttgccacataaggtcacatattcacaggttccaaggattaggacgtggatatggagggagtctttattcagcccaccccagggaacccctccccacaacctcattaagggtgctgggtaacatggggcacgtgcacttgccaaaaggcaaactacggtcctctgaatgccatgagccccaggtttccaggtgaggggtgatgcccctgtga[132 bp omitted]taaacgccatctctactaaaaatataaaaattagccgggcgtggtggtgcgtgcctgtaatcccagttactcgggaggc[136 bp omitted]gctcgcttgctgcgccaatcagcaaattgtttgcaagccctgagcacagagcctgcagaagggggtcccttccatgtccaagcagtaatggctgcagcatggagcgttgtgggggcattgagacaggaggccttgttctagcaggggaggtttgggactggtcgcagaggaggtgacacaagctgtaaggtgggcaggaattcagggttggaggcagaggttctgggcagagacttaaagggtccgggataaaggggaggactggcaggaatcctgcagtagcagaggcagtgagggcggaggtgagaacggcgccaggtgacaggccaagactctgccaccataggacacaaagggggcaatgtggagggtagggaggacggtgtttctggcaaagggaacacctcgccaaaggccgggaaggggaaggaggttgctggaatgttggaggtaggggcgcagtgctccccagaggctcctcaccccctggtgccccctcttctccaggggtctgcggcgactggaagaaccacttcacggtggcccagagcgaagccttcgatcgtgcctaccgcaagcagatgcgggggatgccgaccttcccctgggatgaagacccggaggaggacggcagcccagatcctgagcccagccctgagcctgagcccaagcccagccttgagcccaacaccagcctggagcgtgagcccagacccaactccagccccagccccagccccggccaggcctctgagaccccgcacccacgaccctcataataaacacgtcgattctgtccaggttccttgatgcgctgtggcagggcaggcagcggggcgtggagaatcctcaccacaccaaggcttccagaggccggggtccccgactcagagtcccgcccagaggcaaaggtgctgcaggaacccagcgctgggcatctcacttcccggggtgggggcctgactccccagtctgagggaggagggggctgggggcctggactcctgggtctgagggaggaggggctgggagtctggactgccgggtctgagggaggagagggctgggggtctggactcccgggtttgaggaaggaggggctgggaggctgcactcccgggtctgagggaggagggtctggaggcttggacccctcagtctgagggaggaggggttgggggcctggactcccgggtctgagggagtagtatctgggggcctggagtctcgagtctgagggaggaggagctgggggcctggacccctgggtctgagggaggagggggctgggttgtggactcttggattcagagccagtctttagtaacgcacgtttttggcataaagtggttttattccgagcagaggtaaacgggagctccggcagacccgccctctcagcgcccacagaaagtcccaccacccaccctgttcccctgtggctgtaccacattccactccctcagtattcagctccttgcctcagtttccccacagctcctgaacacagtgtgcctggcagcgactccccatcttcccctccacagctctagcagctctagctcggggcctcacccgggcccctcatcaggaaggcctgaccctcgggagctgtgtgtgtcttctttaggatccgctgcctggggacgctgccagcccatcttctgggttgtgacactgaggtctggtgcaggcaatgggcttgcccaagtccttttttttgtttgagatgaaatctcgctctgtcacccaggctggagtgcagtggcgtgatctcagctcactgcaacctccgcctcccgggttcaagcaattctcccgtctcagcctcctaagtagctgggattacaggcgcccgccaccacacctggctaatttttgtatttggtagagatggggtttcaccatgttggtcaggttggtcttgaactcctgacctcaggtgatccacatgcctcagcctcccaaagtgctgggattacaggagtgagccacctcgatcagcctttctttttcttttttcttttttttttttttttaaagagatggcctctcactgtgttgcccaggctggagtgcaagggcatgatcttggctcactgctgcctccacctcctgagctcaagggatcctcccacctcagcctcctgcgtagctgggaccacaggcgtgcgccaccacacccaactaatttgtttttttaattgtagagatggggtctcactatgttgcccaggctggtctccaactcctggccttaagcaaccctcccaccttagcctcccaaagtgcagggattacaggcatgagccaccactcccggcccaagttgcagaacaagtgacaaacatcccttctgcttgacagacgccgaggccagaagccttgtccaaggcagggcattgaggcagagggctctgagccgacagttgtccggcactgctccttgggtgggccagcagatttggcttgggctcctgttcagggttgccccccaagtcctgcccggggggcccagtctgacggcctgacgcctctgggctcttgaagtttgaatgtagcatccccaccgaaccgccttcgggctggggacagatagcggaggcggtgggcggggggcaggggcagggcaccgccccacggaggtcgggagtccacttccccccaggggcctcctccagtgccccgctgcctcatcagagccttggctggagtgtccttggagccccaggatttcttgagctgtggagggaaagagagggaggtgagaggaggctggggtggggccctgggggcatcccagatccagggaag[143 bp omitted]tgaaaccctatctctactaaaaatacaaaaattagcctgaggtggtggtgggcgcctgtaatcctagctactcgggaggctgaggcaggagaatcgcttgaacccggaagggagagattgcagtgagctgagatagcgccaccgcactccagcctgggcatcagaacaagactcagtctcaaaaaaaaaaaaaggaagtgatagaggatttgagggaggtggaaggagatggtggaggagggaagggagggaagagaggagagagggaggagagagatggaggccggacgcggtggctcacaccagtaatcccagcactttgggaggtgggaggattgcttgagctcaggagttcgagaccaacctaggcaacacagtgagacctcatctctccaaaaaatacaaaaattagccaggcgtggtggcgtgggtctgtaatcctagctacttggaaggctgaggtgggaggatcacttgagcccaggaggttgaggctgcagtgagccgagatcatgccactgtactccagcctgggagacagagcgagaccctatctcaaaaaaaaaaaaaaaaaaaaaaaatgggtggaggaggtaaaagaagaggaaggggtaagggagaaggtgagggaggagaaagaaggagaggagggaggaggggagccaggaaggagagagaggagacagagagggtgaaaggggaaggatgaggtgaggaagaggcaggaaggcagcagcaggaggagggacagaaaggagagggatgcagaggaggaagcaggtaaggaggacggtgtggggagcccgagagggaaggggggaagtgagagggcaaacctgggaccccctaacctacagagggacaaggagctgggtccccacctctgcagctggggaggaaccggaagcgccggcatctgccagccgggatcaaatatttgccaagggaggggatgctgggtgagggtgctcaggaccaggtgaaggtaaggaccttgcccctgcccatcccccgtctcctctccagctaggagccttccttgcctgggacggagggagatgattcctgattcccaaggcattgcagagcaagaccctatctcaaaaaaaaaaaaaaaaaaatatatatatatatatatatatatatatatatatatatatatatatatagctttctttggcctgggatgaggatgtcacaaaataaataaattccacttcaggaatgtatttatttattgtttattattattattattattattattattattattattattattttgagacagccttgctctgtcacccaggctagagtgcagtggaacgatctcagctcactgcaaccgccgcctccctggctcaaacgattctcctgcctaagcctccggagtagctgggactacaggtgtgcaccaacacacccagcgaatttttttgtatttttagtagagatagggtttcactatgctggccaggctggtctcgatctccctgtttcaggaatgtattgttgttgtcattactactctatttcatttagccaagtggattcctcccccaaccaaactcggaatgagtgcccttgctctgctccttcctagatgaggataccgaggttcagagaattcaagtcctcggcttccccccacctagtctgtcatgccaggatttgcacccagggctctcctgtctctgccccatgccacccagcgcccacctgcccaaaatgcagcaggcgtgcaggaaatgaacaaacgatgccattatgaatttaggggtgcaggccctcaggaaacgcctgctctggctgggagcagggcccctggagcctggcttgcaccaccctgggcaaacgccttccccttcctgggctccatcttctggcaccagccacaaggtctcacctcgttgtccccatcactggagccagacagctgggacaggcggcttaggtcccacatggagcggctgggccgggccggggggccgctgggggtccgggcgcgctgcacactccttagaatgtcactgagtgccggccccggggtagcaggggagacgcggcaggcggccaggcggtgggccagcgggccgtcaggcggcggaggcgacgcgggggccacggagcggcggcgggacacgcggtgcgggctgcggccccgctgcaggccacctatgaccgagggtttctgggggggcgcaggtgggagcgggcaggaggccgcgtacagcgtccggaactcaaggctgaaggcgtcaacaatttcaccagtcagcagggtcaccaggcctcggtgcaggcgtgcgtcactccacgtgaagctgggggtcggggagtagggggtcagagtctccaaccctgagggcccagcccggcccccatcctcagccaggtcccaggggagaccgtaggacctcaggcgagtcctgacctctccagcctcagcttccctgtctgtagaatgggcacaactgaagtacctactcgggaggggtggagtgaagacagcccaagttaagacacttatataatcagggccaggtgtggtgactcacactttgggaggctgaggcaggagggttgcttgagcccaggagtttcagaccagcctgggcaacatggtgagaccctatctctacaaaaaatcaaaaaaactagccaggtgtggtggcgcacacctgtactcccagccacttgggagactgaggcgggaggatcccttgaccctgggatttttttttttttttttttttttgtgagacggagtttcgctctttttgcccaggctggagtgtagtggcatgatctcggctcactgcaacctctgcctcctggcttcaagcaattctcctgcctcagcctcctgagtagttgggattacaggcacctgccgccatgcccggctaattttttgtatttttagtaga[143 bp omitted]ccgtgataataccactgcattccagcctgggcagcaaagcaagaccctgtccccctcgcccccctcccaaaaaaaaaaaagccagatgcggtggctcactcctgtaatcccagcactttgggaggctgaggcgggcagatcatgaggtcaggagtttgagatcagcctgaccaacatggtgaaaccccatctctactaaaaatacagaaattagctgggtatggtggcacatgcctgtaattccagctactcaggaggctgaggcaggagaattgcttgaacccgggaggtggaggttgcagtgagctgaaatcacaccactgcactccaacctgggcgacagagcgagactctgactcaaaaaaaaaaaaaaaaaaaaaaaacttatctggaatcagactggagtttaaacccaggctctgcctggtccccacttaggaacacctcaatgcctcagttttcccctttggaaagagacggaattcacttccggacactaacagggattgttttaagacccagctgcttcctagaatgactgccatttagtcagtcctggctgtgcaccaagctctccacgttgctgctccctgcagtgct[133 bp omitted]aagaccccatctctataaaaaattttacaaaattagccgggcatggtggtgcacgcctatagtcccagctactctggaggctcagggaggagaatcacttgagcctgggaagttgaggctgcagtgagccaagatcgcgccactgcactccagtctaggcaacagagcaagatcctatttttttttttttttgagatggagtcttgctctattgcctaggctcaagtgcagtggcacaatattggctcactgcaacctccacctcccaggttcaagcctcccaagtagctgggattacaggtgcacaccaccatgcccagcaaatttttgtatttttagtaga[153 bp omitted]aacataggaatattcaaatgactgaatttgaatcaagccccctgcacgtagctggccctgagagcctgtgagctgtgggggccggtgccctaacacttcctgtcatcacagtagttgttattgaaagcaccaagtgccaggcgtggtgtggtggctcacgtctgtaatcccagcactttgggaggtcgaggcgggcagatcacttgagctcaagagttcgcaaccagcctggcctacatggtgaaaccctgtctctactaaaaatacaaaaattagccagatgtggttgcatgcgcctgcagtcccagccactcgggaggctgagttacgagaatcgcttgaagctgggaagcagaagctgcagtgagctgagatcacgccactgcactccagcctgggtgacagagtgagagactccgtctcaaaaaaataaaagcaagcaagcactgagcatgaatcctggcacacagcaagtgctcagttaatacaccctcttctttcccagcctctttggaattcaatgaacctggctctcatcctggctcggggaccctggatacatcactttccccagccttagtttacccatctggaatatggggtcactatgggaggtgtgaggctgaagtcaagcccttggcgggtgtacagcacagagaatgcggacaagcttgtggccagcgtcctctgggttcagggcgtcttcaccttggcagggatggcagagccctcttgcgccccggcaggtcggcggggcaggccaccccttggattgtgacacccactcctctcacctatgacctcatccccagagcggccagtgggaaccctgagggatctgtgagatcactcattccattcacagactcttgttgggcagcagccacccgctcacctccatccccaggacttagagggacgcagggcgttgggaacagaggacactccaggcgctgaccctgggaggccaggaccagggccaaagtcccgtgggcaagaggagtcctcagaggtccttcattcagcggttccgggaggtctgggaagcccacggcctggctggggcagggtcaacgccgccaggccgccatggtcctgtgctggctgctgcttctggtgatggctctgcccccaggcacgacgggcgtcaaggactgcgtcttctgtgagctcaccgactccatgcagtgtcctggtacctacatgcactgtggcgatgacgaggactgcttcacaggccacggggtcgccccgggcactggtccggtcatcaacaaaggctgcctgcgagccaccagctgcggccttgaggaacccgtcagctacaggggcgtcacctacagcctcaccaccaactgctgcaccggccgcctgtgtaacagagccccgagcagccagacagtgggggccaccaccagcctggcactggggctgggtatgctgcttcctccacgtttgctgtgaccaacagggaggacagggcctgggactgttctcccagatccgccactccccatgtccccatgtccttcccccactaaatggccagagaggccctggacaacctcttgcggccctggcttcatcccttctaaggctgtccaccaggagcccggtgctaggggaagcatccccaggcctgactgagcggcaggggagcacggcccgtgggtttgattgtattactctgttccactggttctaagacgcagagcttctcacatctcaatcaggatgcttctctccattggtagcactttagagtccatgaaatatggtaaaaaatatatatatatcataataaatgacagctgatgttcatggagcattctttgttttcttttctttttcttttcctttttttttttttctttttgtagagataaggtccagctatgttgcccagggtggtctcggattcttgggctcaagtgatcctcccacctcagcctcccaaagtgctgggattacaggtatgagccacggcacctggccaagcctgtcttacgttacgtgccactgaatcctcacaccaagctgggaaggtaaacactctttcaaacatttcaaacatcctggtctcaactccaatcattctcaaagtgtggtccctggaccagaaacagcagcagcagcaagtgggaacttcctgaaaatgcagattctcaggtcctgttccaggcacgatgaatggcagtggggtccaaaagctgtgtattgttctctctttttctttttgaaacagggttttgctctgctgcccaggctggagtgcagtggtgcaatcttggctcattgcagcctctacctcctgggctcaagcaatcctcccacctcagcctcctgagtagctgggactagaagcatgctccatcatgtctaatttttatttttttaaatttttgtagagatggggtcctgctatgttgcccaggctggtcttgaagtcctgggctcaagcgatcctcctgcctcagcctcccaaagtgctgggactacagacatgaaccaccacgcctggcctttttccgttttctttttcttttccttttttttttttttttttattttttgagacagagtctcgctcggtcacccaggctttagtgcagtggcgcgatcttggctcactgcaacctccacctcccaggttctagcgattctcctgcctcagcctcccgagtagctgggactagagatgcattccaccaggcccggctgattttttgtatttttagtagagacagggtttc[132 bp omitted]gggattctggtgcatgcacagggttgaaagccactgttcctgagcagtgttctcagctgggcacctgtgctccccagtgggcatctgcgctgtctggagaggttttcggttctctaattggcagggaaagtcgggggtatggggcgtgtgatgctactgacctctgctgggtggaggctgaagatgccgaggagcctcccacaatgcacccaacagctcctaaaacaaagacttacccagcccgagcgtgggtgccacccctgttgagggacctggttctagaggctctaaccctatcagcccatgacatagagggggaaactgaggcacagagaggtgaagtaagttgcctgaagtcacacaacgaggaactgagagagctagaatttgaatccaggccgtctggtcccagaggccacacccctctcctccctagctgtgctgtgaccctgtgaggtaggtgctgttattatttgcagtttctttctttcttttttttttttttttttttttgcttttttgagatggagtcttgctctgtctcccaggctggagtgcgacagcgcgatctcggctcactgcaacctctctcctgggttcaagcaattctcctgcctcaacctcccaagtagctgggaagacagggtttcaccatgttggcc[131 bp omitted]ggcagagcttagatcccaatccaggtgctcctgattttgaacaaaccccacccccaaactgtttgcccagttttccagataagaaaacaccaggtcaaagagaagcagacttacccaagaccactaaacaggccagcaccaggtccggccgcggcaccaacctcctccgcagggaagagtgttttgcccccattacacagatgagaaaagagaggcctgggcaaggggatgccagctgttctctgagcacactgagggaaagtggggtataggacgccgggaggtggggggcggggcgggggctacacctgtaggatcctgagatgaccctctcgccgtccagcagcacaaacttctcccgcacggtgccgctcacctgccgtcgccagcggctctggaagctgcagccccgcacgacacggacatccacgttctgttggtgtggggagtggagggtacacccttgctgaggcccactgcatggattcaggctccctccagactggttctaactgggggacc[140 bp omitted]ctctactaaaaatacaaaagttagccaggcatggtgacacatgcctgtaatcccagctactggggagtctaaggcaggagaatcgtttgaacccgggaggtggaggttgcagtgagccgagatcacgccactgcactccagcctgggcgacaaagcaacactccgtctcaaaaaaaaaaaaaaaaaaaaaaaaaagaagtatctgtctcagcttccttagagccactgatatcaaccctcaggcgtttcttggggatacccaaactcagtgactcaagattccttgggaatgcccacccccacctccccagtgctgtgggcatcagatcccaggggaccatccctgctagcatccatctcaatgacccggagctccatggaagggtctgcccccactgcccccatgccaggggaatggggactcacaggaccccctggcccggcccctacctccgtgttccaggggttcacccccagctgctgggccagttccaggaaggcaggcagctgctggcggtccaggagcaggtagacaggtacccagcggcgcgtggcagcatccaccaagtccaaaagcaggtctgggtcagtgaagacgtccatgaccacggccaccagctgggcatggggagaggggcggtgggcttgtgaacggaagctggctcaggggacactcagagggtgtgggaaacctgacatctggaatctgggagtaaagtgctctgggggctgggagtttaaagttcaggtgggctaaaggggagacccccagacatacactgctgctcaaacagcacctacgtgtgaatgagcaaaacgctgcccctccatgagatccccagcccctcctcgagattcccggcccctaaatgctggaaaactgtaatcataaatcatgtttgcttgtttttttgtgtttttgttgttgttgttgttttttgttgtttttttttttttgagacggagtctcactctgtctcccaggctgcagctcaggggcgcaatctcagctcactgcaaactccacctcccgggttcaagcaattctcctgcctcagcctcccaagtagctgggactacaggcgcccaccac[141 bp omitted]ggctttttttttctttttttaaaagacgaagtcttgctctgttgcccaggctggagtgcagtggcgcaatatcagctcactgcaacttcggcctctgggactcaagcagttctcctgcctcagcctccagagtagctgggattacaggcacccaccaccacgcccggctaatttttgtatttttagtagagacgggatttcgccatcttggccagggtggtcttgaacccctgacctcaggtgatcccccagccttggcctcccaaagtgctgggattacaggccgtgagccaccgtggctggcctacaaatcacgtttataacacagaacagcgtcccctgagctgcgacactgcggtacccaaatgtccacggcagtttggctgtaggatcagtggtggatgtcccgtagggcactgtgggcaactgcatttctgggtcctgtggaattttctgggtgctgggtgcaggacggctgacctgctaggccaccgtggcgaacttgggggacacggaggtgctgaaggcctggatcttgcaggcagcataaagcagtggaaaccctgactcagcagccagacagcctgggttcaaatccccactcggccacttacagggaagagatttaaccgcccccgtgcctccgtgggcacaatagtccctctggcggtacagggttccgggacgatgatgcacattagtccctgagaaacccttcacgtgggagctggcggacgctaaggctgtgaagtacacagcaggctttccaagggctgcagtgtggacatctgggccttccttggagggagagtggaaacccctggcttggtgatgaggggatgggggaatgactgagactgggggtgtcataattaggttcaaggggcatcgatacctaagggcatccaggtcttgggggagggtaggggcccccatttctttctttttttttttttattgagatggagtctcgctctgtcgcccaggctgaagtgcagtggcttgatcttggctcactgcaacctccgcctcccgggttcaagcaattctgcttcctcagcctcccgagtagctgggactacaggcgcccacaccatgcccggctaatttttgtatttttagtacagacggggtttcactatgttggccaggctggtctcaaactcctgacctcgtgatccgtccacctcggcctcccaaagtgctggaattacaggcgtgagccaccgcgcccggccgggcccccctttctgagagtaaggatgaggtctggggttgtaggcacctgagtcctggggctggaaggtgtgcactcctgggtcccaggggtataggtcctttagggtaggggtgtgcgcttgcaagtcccaggaggacaagggagagaatgcctgggtccccgtcccagtctggtgaatggacacagggcccccgcgacacccaccttgtgggcagcctggatctccagccgcaccagctccttgaggggcggctgaccctctccaggaggctgggtgtacagctgcgcccgggtgatgcctttccacgcagagtccactggccagcccagccgcaggacgggcgccggctgctccgactgcccaggccagtagctcaggctgcccgcgtccacatcggtggtggtggctccctctgccatcccgctgggctcctgcttggccactgtccagtcttcagctgccgctgccaagccctgaacctcatccgcactgaggaagggccacagctcctcgcgctgcacgcaggtctggaacgcctccgcgcccttgctcaacagagcctccagtgccagccgctggccctcggaatatagaaagccggggctggccccgggcaccctgggaccggagtccactccttccagcgccgccagctgggaggccgccatcggggtcactcgggtgggaggactgactgtgagaggctgggtccccgggggtctggctgtctctggggactgtgatcatctgggggttctcctgataggcagaccctacgtggccatccgaggcctccggcggggccctgcagatgtccaaatggctccctgcagcagcccctgccacactgttctgacaatcacgctgcccaaataagcgaccatccaatgtgtcaggccactcagatccgccacctgcctgcacccagtggcaccatgcctggctggccttccgtgaccttcctgccagccgtctctgctggtcaggttgacctcctgacaccatccccaactgtgtgacccatcagctggccatctctgctcagccacacgacagcctccaacccaccagtcacacagtgcccagtcagacccttcagctgtcctgaatttggtcaggctgaccacttgatcatttccaggcggcaagctgcctgcctgtctctaatcacccaaaggtccttaaaggcacgacaggttgcctgcctgcccccggccaagagcacgacgaactgaccctctccttccactgtctggcaaacgccaatggcttccgactgacagtcacagtatctgcctgttggagcatctgtctctggccaaatctgacagcccccacgagtttctcctgctcatcagctctcacccgcagaccagccaggatgcctctccactgggcctgctcgctcagccttaaaggccgaaggcttggcaaacccttccctaccctgtcaatgggggaccctgctccctggaccctcctcacactccttccagctgctgcagtggagggtgaaatgcgctacaggggtctccattactatgggacaggtctatgatcttcacagcccatctaggtgtgagtgccacctaaccagccaccctcctcaggctggctgcccctgcctggggcctggccctgggacctgttccaggccgtcctctgatctgcggggagccctacccaagctgcccccagcctggtttctgcctaaatgctatctcctgccagctacccggacgcttcttcccggacaggggccagtctctatctcgccctgtctccctcccaagcctcagttatccccttgaggctcctgacccaacctcggggaccctggacccttgatccctgcaaaccagaagcccttcattccaatcccaccaacccaggccgctgcttcctccagaccacagcagggagctgcaaagagaagaaaggagtcaaggcaggccagcctccccgccccaccctcacccatcccccccatcgccggggctcacccacaccggctagtgccgggctcaatggcctcccttccagtgcctgctttttccgagaacgtaggctgtggctccccggcttctacttctgcggtgcttcccggcttctggcctcactcatcaggcctcgacctggaatccagggagcccggccccttgtgtaaacacaggagggcccccacaggcccctggaggaggtccgggggtgcggctcacacgctttctttacctgtgctctcccagggggtgaacgcccctctagactcaggcttcccggtccccggggggttgagattgcctcacctgttcccaggcagtctctccctccccacagccctgccagcctgcaccctgcacttcccggtccacgccccacccgccatcccagcaccagggaggggcacaggatcctttaagaggggcgggcgtggctgacccaaggaagccggtgtgggaacacctgccacctggctgttgggaaggaggcagggagcttccggggcagtgggggcaggaagagggctggtcttcactggcatgacgtccctgtccccaaaccaaatgcattctcacccgcaggaaccaattctccaacccatcccccaataacacacacagagcactgtcagcaaaaatctttttaataagagagtaggatccagggttagtttttgtagcctcggctggcccgtcggcctctggcacgctcgaacttccggcccttggagcggacgtagggtctgtggggagaggagggagtgagaggggggccctcttaaaggaggccattgtggagtggcacaggaacaccacaagcctgtcacattcagccccaggagagtcaatgctgctggaaaagcttggcagagtgggaagccaaggagccaggaggggctatggaagcacctgccccaccacctggagggtcccagcctgggctggcaaaggccggtgaactgcatgctccccaggagatgcctgctcaggccctggaaaacacagctccaagcagtgttgaagggaaaagcaggcaggatgaggcagctgagagttccagaaggcctggggctggctggtacgagggataggagaagcagcccaagtgtggccaggcctggccctgcaggctgagtctggggagagggcagggctgggggcctgatactcacttggtgtggctgtgcggggttcctggggccttgccgaaatgccggtacacctctcggcccttgcgaggacctagggaaggggaaggagaaccgggtgagacagggatctggcgcccagcttctggcctcccagatccaggagggtgaaggctgccagtagccacacagctcagtccaaacccgtcgaccacgtatcactcaccggagagcaggacagtgccacagcccttaggggagtccagggccagctggtcgaaagtgaggatcttgccccctgccctgaggatgcggctgcgggcccggctggtcacgcgcagtgcacatacctggtggagaggacaaggctggcgggtcagacccctgcgtggtcacccaggggctgccaggactcaccctccactgccttggcgcagcagagccctggtaaccaacactatcgtttactacccggagcaccctgggctgacagcagcagttctcaacacttccggaactttcaccaccacatccctggtgttatgctagaaactacagcaaggaagctgggccaaaaaaagacctgtgcagaggtgacaaaggagtctagacttgagcccaggctgtctggctctaggggccagcactaacagtttacaacttgccccagaagaagcttgcccaggggaccccaccatcaaccatgccagagacgacccacaccaatcctcaaagccactcagacaggcaggatgcttgcctcaccagcggtggcaagactgaggatggaccagcacagcacagcacagcacagcacagcacagcacagtacagcaagggtctgatgggtctgcccagcccccgccagctcaccttcagtttgggtacctcctgaacccgcacatcatcagttatggtccccacaaccacggccgtcttgttttcccggccaggaagcttcatcttccggatcttagggtggggaggatgtacgtcgtaagttgttctggtgtttacattcagccccgcttgaggcatccccaggccagggcagctgtgccctctaacgggaccccccactcacaccacaccccttaaaccccacaggcctctcctcaggtccagctggggaaagctccagataaaaaaaaaaatgcagactgttcaatagggcctccctcagcagagcctttgacataaaactcagttatgacttggggcaatctcctgaagccaccaggacacctccacctcacaaagagaaggagaggaggaccaggagacttgcccactgcccatggacactcagttccaaccaacagtccaagctctacgctcgcgactggctgagacaaacccttgatgccctggttgctcccagagctccaagtcctgcctcccttccagacagacaagacccagcggctcccaggtctaccgtgctctctggaccagccactcaccatccgggaaagggacagaggcggccggttggtgcgactcataaacaacctcttcaacacaacctggttgaatgtggagttggttcttctggccagaaacctgtataactggagggacgggaagacagtgagaagctgggacagcctgctcccccgcagccttccagtgaaggggcaaacacatgatgatctggactaaaataatctttatccctttcccccaacccaccgacctagagggagaaagctggcccaggtccttcctggccaaggacctagaaaatcctggctccactcccgagctgtacacagcctagaggctgaaaatacaaatgcaggagaccctggaacagaaccagagacccgagactgctctgcaggcccctgggaggagcttggtgccagcactagaatggaggatctgcaagtcagacctggggtgacccttcccaaagacctcagggcccagcctcaccttgaccaacagcctcaggtagatatcctggctcttgggctccttgcgccgaacctttcggtccttgttatggcggatgtccactccctgtgggggtgaagaggcaaccatggacccaattacccccaaccatagccaattattacttatttctgaaactgagagctgggacacaagcccaggtctgaacacaccagctcaaatcccaggcccaccaccaggagacctgtgggctgccactgatccctctgtaaaaaggggctgtttacaaagccttcagcccatggcacacagaaccctgaaacatcgtaacacagcaatcatattaacttaatacaaaaaggtcaattctttacaacttgtattttgcaacaatgttatcaaaactggttcccatacccggagggataaccaaaaatatcaaaccaatggcagtaatgatgaaaacgaatccttattcagaacctagcaatactactagaaccacctctcctacagcatcagtcaatccaacaacccttaccaaatagtgtctttttaaaacatcgtttttaaagtggagacagggtctcacaatattggccaggctggtcttgatctcctgggcaaggaatcctcccgcctcggcctcccaaagtgctaggataacaagcgtgagccgcctcgccaggctcctaccgccctgctgcctttctgagcaacttaagtttttcagactgtgttgacaattacaagaactatttaatagctccacttatgcagcacttactgtgtgcaaaaccccgtgatgagcatctcctgtgaattatttcttcccaaattcacaaacttgtcagatgagattactgtgtacccaacgaacagccagacactggggcaaaggctcaaaaaccatcacaaggtgggaaggggcctgagactcagagacctgcctggtccccaaatccagttattcggctctcgatcctctcacccgccgcggcccccatcgaacccgacttttcatactagaaagtgacaggtccagataaaggcagcaaagccaaataactaagagtggctgcgggtccagccacctgggtcggaatcctggctctgccacttcctggctttgtaaacccagtcatatcagcctccgagtacctccacttggtcatctactaagtgggggcggtaggctatgactgacccatccctgctttcctggcccccagagtaggtccccagtatcgggaattgctccctccgggcagccgcagaccccctgccgccctccagcgtgcccctagcccaaaaccacggcggatggcagcggattatccagccccgaacgccgcaaagcgagctcaccatgatggcgcctcctgctcggccaggtccggaaagagagaacgggctggggtgggcggggaaagcctcaagcgagtggcgccgccgtgacgtcacatgggtgcgacgcggcgctctaccacgatccggacttctctgtggtgagttggacgactgactagccgggcgataacggcagagagcatagagcgcaggaacaagcgcaacgtccaagagggaagggccagcacgtcgggggcctctctggccctacccaggccgtgttctcgatagctttccggaagaaagggatctgggagcgagatgcgtgtagctagcacgatgcgtcgcgcggtgacgctctggcccgacgccgacggcctctcagtggctcccggaggacccggcgggcccagtgttggaggtgaggaggcggggctggcagggctagtcggggcatctggaaatttccgaccccacgcttcgggcgtttccttatcaggttcaccgctccctgatctcgcgctgcacttcgtaggcgcagccgctgcttgggaagtcctacttaaggtctaacccgagatgatcttgctgcacctcaatctatagcatcctgtattcccatcctttgagttccgcttctccttctcccccggcccctagatggcccttccctgacctagaaagagggagacagagtttcataggggaggcaaaatggagactccgtggcttgggggtggggggaatggaggcccaaagggtaggaaggagacctagaaagaggggtgagatggagacccagggagaagtagtggcaaagaaagatggtgagatggggccttgcaaggctataaccaaattcaaatcctggctctgctagttactaatggggtgattgggcaagtcatttaacctctctgtgatcttgggaaaatcacttaacttctttgggccttactctccttatggacaaaaaggggatgacaacaggcctggcacacaggggtgtttttcaggattatgaaagttaataaaactgctgaggtcaatattttgcacataataagtgctcaataaaaattagccttcactcctattatagcatacatattgtgtgcaaccagatggactggctggggcagtgattaaaatgacttatctactcttccccccacccgccagggaggcccctgcctcttggttctcaggcacattgagcctggaagggcctcctgcagttggctgtcaatgctgctcctcacttacctctcctccacagagctgaaggtcaggccaggacagtgagacctgactccttgctcctaccagcctactatggcttaagacccagggccagggtcccgttgatgtaacagagcagaggaccagcagatgaatggacaccttgaagcagaggagcagcaggaccaggtaagggaccatctaaaagccaagatcctcatactgtggaaagacaaaatctgaagcttttctttaaaaaaaaaaaaaaaaaattggaggccaggcgtggtagctcaagcttgtaatcccagcactctgggaggccaaggcctgcggatcacctgaggccaggagttcgagatcagcctggccaacatggtgaaaccccatctctactaaaaatacaaaaattagccaggcatggtgatgcgcacctgtaatcccagctactcgggagactgaggcaggagaatcatttgaacccgggaggcagaggttgcagtgagccgagatcgcgctgcactccagcctgggtgacagagtgagactccgtctcaaaaaaaaaaaagaaaaaacagggtctcactcttgcccaggctggaaagcagtggcacaatcacagcctactgcagctgcaacctcctgggctaaagtgatcttcccacctcagcttcccaagtagcctccaccatggctggctaatttttttatttttatttatttatttattttgaggtggagtttcgctcttgttgcccaggctggagtgcaatggcacgatcttggctcactgcaacctccgcctcccgggttcaagcagttctcctgcctcaacctcccaagtagctgggattacaggcatgcgccaccacacccagctacttttgtatttttcatagagatgaggtttc[133 bp omitted]tccctctgttgcccaggctggtcttgaactcctgagctcaagggattctcccacctcagtctctcaaagtgttgagcttacaggcatgagccaccgcgcccagcctgggagcccttccataagtgatttcagaccttctctccaggcaggtgttccagtgggataatttaggaatcagagaaactgaggggttgaggaggatacttattatttattatttaggtgcactggcccagtcagattaacatcgaaaaagactgagcaccgaacaaagagtcaagttacattttaagtatttcgtggggtagggggagatctgtgcagggggaagcatattatagcagcgagaaacaaagacagttattcaattgagacatgcattacattatttcttacttttcaaggaaaaacatgttttaggacttgagtttatcctgtctagtgaccttgcagctgcacagttagagaaacagggtcttcacgatgcctgggaaagggagttagataaggctcactagccacaaac[223 bp omitted]c[139 bp omitted]ctttctcttcctcagggggaattgggttttttacatacaactgagtttttgcttacacattctttaatttcttttaattcctgtttcagtgtgaatagctttctccctacttcccagacaggacagctgaggccaagaattcaggggcttcccagcagtcacacagcaagtgtgtgtgagctgcagggtcctttctccttttcctcctccctgtcctctcgtctgtgtgacttaggctctatgtttgaatctcagcttctttgcccagtgtctctgcctttccttctcccagggccccaagctcagttgctgtgccccagtctcagtcttactgggtttctgttcccccttctctccgtgtcattccttggcacatactatctggtgctgttgctactgtgggttggatgc[137 bp omitted]acctccgcctcttgggttcaagcgatctcctgcctcagcctcctgagtagctgggattacaggtgcgtgctaccaca[137 bp omitted]cggtgaaaccctgtctctactaaaaatgtaaaaaattagccggacgtggtggcacgtgcctctagtcccagctactcaggaggctgaggcaggagaatcgcttgaaccaggcaggcggttcagtgagcctagatcgtgccgctgcactccagcctgggtgacagagccagactccatctcaaaaaaaaaaaaaaaaaaagagagagagacgggggtttctccatgttggtcaggctggtctcggactcctgacctggcgatccacccgcctcggcctcccagagtgctgggattacaggcgtaagccaccacgcctggcctacagcctacatttgtcactttctagtgagctctgtccttgtctcctaatgcatatctctttctctctatgcaattctgtttctaagtctcctaatatatacttgcctttctttcaatttcaccatgtctttgcctcggtgcatctgtcaacatcttcactttctgtcccagttcctcccagcccctgggcttccaatattctctccctccctcacctttgacctagagatactgtccccatctctctgtctctgtcttgccatgtgactggttcattcactgggcagatgtttatctcatgccgcttccattctggtttgagcctgagataaataagtctgaattaatgagcctctccttcgcggcttccattccagaagtgtctgtctccatctgtctccgtgtctgtcattttcagggttttcttgtatccttaccttgcacattctcaatcccactgttttggtctcttgtttatatctctgcttttctctgggtctctctgactctgtaactgtccgaaaaaaaagtatccttcactttccccactctccctctcctcccagctctcttattgcctcatccaacctctgtgggtctctgccttgctctgtgtctggatcggatctctgggcctttgttacgcgtgttagagtctctgtctttgcagctaaagacctcctccctcacgccccttttcttttgtgaattcaatggatgagacaggcccactctcccttaacaaagatggcgacaacggcgctgtctatggggccgcgacgtcgtctccgctgcgcgtcggccctcacccacgatggcggccagtctcccgaagcgcgaggccccgcccagctctcggcctctcccgcggccggtccctgcaccaagctcgcgagctgactggctccaccccccgcgccctcgtattggtgcggcccaggccggctgcacggccattggctgagcggatgcacaccctccccccacccctaggtctgatgggggctgttggtgctgacttgcgggaccgcctggaggaggacccggcgtgtgaggagggtgcgggggtcggggcagggaccggagtctaggggactgagggaccaagaggaacagagactcaggcccgggactggggcaccggggtgggagatggaaatggaaaacctgggccaggactgaacccagccaggcctgggactgggttctggaaataagagtgcggatggcggtttgggggcccagggccagacacgcaggcctatggattggggaccaatggatggagacccaggtccaggtctcggggacccagggacagagacccaggcccaagactggaggacatctagggctctgtgcttgaacctgatttgaggttcccataatggggccagggcaggtttgggggtgaagcagacgtcctggacccgagagagccgctggggataggggggcagatgtagttcctaagggtgagtccacaggcggtggggggtggggggctgtcctggcgctctgggcctggggaatgtgaggggcaggactggcaggtggctgggcggggcagtggggaacaaaggtgagcgaaaggaggaggcagaatccgggcagagggcagggagagggcctgtggggaagggacctcagtcctgctcccacccgctccctggagagcaggcggccagacacccaggtcagtgctcagggaccagctcttggcccctgccccttgcaggcgctcgcatgtggctcctctcggaccccgtagtccctgtcatatcccttctctccagctgtctccatgcctgcctcgtacccctcctatttgctctcccttccactctgtcttgcctttctcgttggggtgaaaaagtcttactctcttaagtatctttcatcgcctgagtttcacctcattgaccctgtttgtctcctctcagtgtttctctggctctcagaccctatctctattgcgtttgtgattgttttgctgttttacccactgcaccgtatggggggtgggggtgtcggggaggtgtgtctttcagtctttgcatgtctgtttctgcatatccaatcccactatccattccccttcctgtgccttcttttcccccaaagcccgttatcatcacccaaccacctgtatatttcaatcctttctcttgtttatctattcctatgaaggcaaggatttggggctattttgtctcctgctgtgtttgctaggcctagcaccgtgattggcacataaagggtactgaatacttactggggaataaatgattggatgtttgcatgcccgggtctccggccccctctgggatgctggcctctgtcccgcatcctcaaggtctgcccacacctgtctgagcctgtctgtctctgatgctcctgtctcacctgccactgcccctcattgtctcctcctgtccacagcccctgcccctccctgcccctgccatggggtcctgaattctcaccccttctctcctcccttcccacagaggccagaccaggagctgaccgggagctggggccacgggcctaggagcaccctggtcagggctaaggccatggccccgcccccaccgccactggctgccagcaccccgctcctccatggcgagtttggctcctacccagcccgaggcccacgctttgccctcacccttacatcgcaggccctgcacatacagcggctgcgccccaaacctgaagccaggccccggggtggcctggtcccgttggccgaggtctcaggctgctgcaccctgcgaagccgcagcccctcagactcagcggcctacttctgcatctacacctaccctcggggccggcgcggggcccggcgcagagccactcgcaccttccgggcagatggggccgccacctacgaagagaaccgtgccgaggcccagcgctgggccactgccctcacctgtctgctccgaggactgccactgcccggggatgggggtgaggtgctgggcagctgctctatcctggagccaccttggtgtctctgcagaatttcctccataggcagctgtgtctttatttttctgtgtgtctgggtgatgtatctctctggatccgttaggagtgatacacagggatgggctacagaaggaacaaaaagacaagaggaccggatgtggtggctcatgtctgtaatcctagcaatttgggaggctgaggcgggtggatcacctgaggtcaggagttcgagaccagcctggctaacatggtgaaaccccatgtctactaaaaatacaaaaaattagccgggtgtggtgctgcgcacctgtaatcccagctacaggagggtgaggcaggagaatcgcttgaacccaggaggcagaggttgcagtgagctgagatcgtgccattgcactccagcttgggcaacaagagcaaaactctgtctccaaaaaaaaaaaaaaaaaaaaaaaaagcacaggcagaggtcgcgtgcagtggctcatgcctataatcccagcactttgggaagccaaggcaggcagatcacctgaggtcgggagttcgagaccagcctggccaacatggcgaaaccctgtctctattaaaaatacaaaaattagccgggcatggtgacggatgcctgtaattccagctactcgggaggctgaggcaggagaatcacttgaacccgggaggcagaggctgcagtgagccgagattgcaccattgcactccatcctgggcgacaagaccgatactccatcacaaaaagcaaaacaaaacaaaaacgcaggcagagaaaagtgatttacatctgctgttctcttgctagatttatgtttctgtctcctatcctcttcccctttgcatgggtcttgaccacaggtgagtcacccagggtggtgagagcagcagcctgagacaggaccaggtaccacccagagtgatgggtgccaacagaggtctagggcttccctggagttcagaggtggcatctaatcctgcctggggcccctaagggctggaagtaacctaatcctgggtaataggtgtttggggtgaggaaagtgggaaccacagctctgaactacagctcctcccacacatggggacaaagggcatttggtttcacacctaagccctgcctttgtctcagcagctaggagttggggcagggctgcatacctaggcctggccacatgagagccagcaggtcccaggggccagccctccaccaattccgttgggggctgatgaagggactgtttccaaggtggggggcctgggtcactggcctctgcagaccctaacctctctccacagagatcacccctgacctgctacctcggccgccccggttgcttctattggtcaatccctttgggggtcggggcctggcctggcagtggtgtaagaaccacgtgcttcccatgatctctgaagctgggctgtccttcaacctcatccagacaggtaagggccagtgagaatgggagctgggggctgggacagctgagtcctaagggagcaaagtggtgggtgggactcctgggtctatggggctggggtgggacagcctgcctaacagcccggtatcccacttcagaacgacagaaccacgcccgggagctggtccaggggctgagcctgagtgagtgggatggcatcgtcacggtctcgggagacgggctgctccatgaggtagagcaggagcaccctgcccctagccctgggccctgggggactatagagactgccaccaggacccaggcttctggtctcccaccctccaggtgctgaacgggctcctagatcgccctgactgggaggaagctgtgaagatgcctgtgggcatcctcccctgcggctcgggcaacgcgctggccggagcagtgaaccagcacggggggtaggttgaggataccacgaagggagggatgagcccctcctggggtgatagggacccctatatctcccactcagccaaacccacagtcagtcaagtaaatcagcctgcctgtgggatgctcacccccagctcctggacatttttgcctgcctgcttcccagctgtatcccgagcgcccagaactctgcctggcatgggaggcactcagtgaattgtagggagcaaatgaaagatgaccaggaacctggccccgtaaggagtcgcctggaggtggccccacggctgtggtgggcctgggccatggccttcgtggtctcattgccagctgctttcctacctgtctctttccccaacccctgtttgctccttccttctgtgtgtccgtccatctccggctgtgaagatttgagccagccctgggcctcgacctgttgctcaactgctcactgttgctgtgccggggtggtggccacccactggacctgctctccgtgacgctggcctcgggctcccgctgtttctccttcctgtctgtggcctggggcttcgtgtcagatgtggatatccagagcgagcgcttcagggccttgggcagtgcccgcttcacactgggcacggtgctgggcctcgccacactgcacacctaccgcggacgcctctcctacctccccgccactgtggaacctgcctcgcccacccctgcccatagcctgcctcgtgccaagtcggagctgaccctaaccccagacccagccccgcccatggcccactcacccctgcatcgttctgtgtctgacctgcctcttcccctgccccagcctgccctggcctctcctggctcgccagaacccctgcccatcctgtccctcaacggtgggggcccagagctggctggggactggggtggggctggggatgctccgctgtccccggacccactgctgtcttcacctcctggctctcccaaggcagctctacactcacccgtctccgaaggggcccccgtaattcccccatcctctgggctcccacttcccacccctgatgcccgggtaggggcctccacctgcggcccgcccgaccacctgctgcctccgctgggcaccccgctgcccccagactgggtgacgctggagggggactttgtgctcatgttggccatctcgcccagccacctaggcgctgacctggtggcagctccgcatgcgcgcttcgacgacggcctggtgcacctgtgctgggtgcgtagcggcatctcgcgggctgcgctgctgcgccttttcttggccatggagcgtggtagccacttcagcctgggctgtccgcagctgggctacgccgcggcccgtgccttccgcctagagccgctcacaccacgcggcgtgctcacagtggacggggagcaggtggagtatgggccgctacaggcacagatgcaccctggcatcggtacactgctcactgggcctcctggctgcccggggcgggagccctgaaactaaacaagcttggtacccgccgggggcggggcctacattccaatggggcggagcctgagctagggggtgtggcctggctgctagagttgtggtggcaggggccctggccccgtctcaggattgcgctcgctttcatgggaccagacgtgatgctggaaggtgggcgtcgtcacggttaaagagaaatgggctcgtcccgagggtagtgcctgatcaatgagggcggggcctggcgtctgatctggggccgcccttacggggcagggctcagtcctgacgcttgccacctgctcctacccggccaggatggctgagggcggagtctattttacgcgtcgcccaatgacaggacctggaatgtactggctggggtaggcctcagtgagtcggccggtcagggcccgcagcctcgccccatccactccggtgcctccatttagctggccaatcagcccaggaggggcaggttccccggggccggcgctaggatttgcactaatgttcctctccccgcgggtgggggcggggaaattcatatcccctgttcgtctcatgcgcgtcctccgtccccaatctaaaaagcaattgaaaaggtctatgcaataaaggcagtcgcttcattcctctcagaccttctgcccttcctccatccgacagcccgcgggaggactcagactccagcacttccagcagcgcctgccctctatggacgacagcccggagctgcccacgggctgcagccagtatgccagggagctgccctcttcttccacaacagctggctctggggttctcaagatttattcaggatcgtgttaacggaggcggtgggaggatagggtccctgacgtgccggggacacacacagagaaccctccccgcccccgcaagggaggggggaggctcgctttttcttaaaaatataaatgtatttatctgcattatcacgtccctggggcacccagctggccggcccgtgggccacagggcaggaagggaacagggcgtaagtctcagcaaggcggaggagagctccgccaggtggggatgtggggcagcctcacagggccccgtgctgggcctggtatcgggacagcacggcgcggtagtgggacagctcctggcgcacggccacaacttcctgccgcagcagggcgttctccttctccaggaaggccgcccgcaccgatatctggttctccttgagccgccgggcgtcacgggaccgcttggctgcctcgttgttcttgtaccgccggctccagtatttctcatcctgcaggagaagagggggagagcactgaggtccagagggacccaggtcccagcgagagaggaagggagccccagcagcggggcctaaaccacaccaggtctctgctgggataggtacccaagggtctgcctttctagggccctggttgctaaggagattgggcccctagcaacagtaaaggcatgagatagaccccccaccctcaagcaactcgcttcaagtctccactctgcaaagcggaccccagccctccccacatgataaaggcctgcatgcagttagctcttgcttgctaaggatgcttgttccctagcaacaaggccttcatggtctgagggcttctcccaatgaagagcactgccctgccctgcacattgcctttccagatcctggttgctaaggaaagcttggtgccctggtgatggggtttggtgtcccataaaatcctcgcagagctggggccttctgacctggttgccaaggcaacctcatccatccttggcaaacaaaagtgaggtctaagtggtttcaatgactgtggccagcctctgacctgctggccttgaactgaggccagagaatagcctcctccccagtaggacctgactgagagaagagctgtctcttaggaaaggggactatcctgagacctccccagaggattatacctaaagtcctcccatcctggaagttggttcctaaggaagactcctccttagtaaccaaggaccacggggctcagaaagatgctctctactccactatttaattaaagcccagttcctgcttgtgagggtaaatccagtccctagcaacagggccctctagaaggagaaaccactggtgtagatctgacttccaggccagtcctaggtgcttcaagtagctatgtgttacgcaagggtatggcaaagtcttgtttgtttttgagatggagtctcgctctgtcgttcaggctggaatgcagtggcatgatctcggctcattgcaacctccacctcccaggttcaagcgattctcctgcctcagcctcccaagtagctgggattataggtgcccgctacca[136 bp omitted]gcctcccaagtagctgggactacagatgagtgccaccatgcccagctaatttttgtatttttttgtagagacggggtttcaccatgttggccaggatggtctcctgatctcgtgatctgtccgcctcggcctcccaaagtgctgtgattacaggtgtgagacaccacacccggaacatttttgtacttttagtagaggcgaggtttcaccatgttggccaggctggtctcaaactcctgacctcaagtgatccgcccacctcagcctcctaaagtgctaggattacaggcgtgagccaacgcgcctggcccggaatgacaaagtcttgtaacagaagcccaagcaactcttgctagggaagactccagtaatggcaaaaaacaaaatcatgcaaagatgcaatgactgctcaaatcaccccaaatcagaaagtggcactggctgctaacagaagcctgaagtctcccaccagtgagaagtccaggcccaggaaacaaggcctaaaggggctggcacagtcttcatcctagccaaatgcaatcactccaaaggaagtcccacatcagagatcaaaggcctgctgagtaaggagagacaggccacaggctgatatcccattgccaaaggaagactgtcctttgcaagtgtgcctggtggagctctggacccaagtaataggagaagctccaagtctctacaagtagacctagcagagctggctgagtcagcaccccacagtgacactgtcttttgttttaagacaaggtctccctctgttgcccaggctggagtgcagtggtgtaatcttggctcactgcagcctcaatctcccaggcacaagcagtcctcccacctcagcctcccaagtggcttgtagaaatggggttttgccatgttgcccaggctggtcttgaactcccgagctcaagagatcctcctgcctcagccccctaaaatgctgggattacacgagtgaggcccctcgcccagttgacactgtctttataaacctcaggcccctgcccccttgtgccccgtggccaaggaggactaatctgtggctgcaggccaggagaggctgagcactaatcccaaggagaagcccaggcttgactgtgagaaaaggcccctccctggctgtggggcatgtctccagccaagtctatctcccacatccagctctgctcaccttctgctcctccggcacctggatttttcttgccttcttcatgattggctggggcttaagttcctcttctgagaagcgatgtcttcgagggtcaaaggtctcgtggccaggaatgcttgatagggcaagatcagctgggtcgggttcaaaggtcatcaacacctccacggtgtctgggtccacagggctgggtgtgtcccgagaggtcaggccttggggaaacagcacgtgtcagctgagtgtgtattttaaggagggggtttcctgaagctactttttgctgtggtatcatagccacatggaaagtccttctgggatctagcataaattcggccagggattaatctccctaatataaaatatgaaggttcccttggccaggcgcagtggctcacgcctgtaaccccagcagtttgggaagccgaggcggcgaatcacctttagtcaggagttcaagaccagcatggccaacatggagaaacctcatctttactaaaagtacgaaaattgcccaggtgtagtggcgggtgccggtaagcccagctactagggaggctgaggctggagaattgcttgaacccggaccctggaggtggaggttgcagtgagctgagatcataccactgcactccagcccggacaacagagcgagactccgtctccaaaataacgagaaaaatgaaggttcccctaagccataaagatgcttagagatcatggagccatatccacctttacaaacaaggaaactgagtcccagtcataactgacttgccctaggtaacacacgaatcagggctattgcttctacacttgatcttagccaaaaggccgagaagcgatggggctattgcttctaaaacctcaggacttcagatgcacagtctagcctgaatcctacttaccgaatccacgacctaagcttagaccccagactgtccagagaaaaagaatctactgcactgaaaagctctcaagttagagtctaagagctactcgctggaaagaggaggagaagctgctctaaggttccagaagattggttcgaaaggaggcgcctgtacctttaagcaccagccagccggggccagctaaggacacaggttcagggccgagtcacgtgctgacgcctgcttccctcctcctcccttcctcccaggcccccgccatcggcgccctcacgttcccccggccccgcccccctcgcgcttgaaggcgcctgcgcgaagcgcggaggagggatgggaggactcacgtggcgcaggaatgtgccgctgggaagggtagggccctggttcggcccggaggtcggacctggagcaggtgtgcccaggaatccccgacctgcagtccgtccctggagacctcaatgtgcccaaagggaaacatctttcctcttgctcttccagtcacttagttccactcaacctccaaagattcccaaccccctgctctccggggagcatcggcctcctggaccttcccagaacccccgccactgggctaccacgattctgggatcccaggcctctcctaggaatataggaagcttggccccagccccaattggaggatccagaaacaacatccctaacgttttcccttctgaagaactctgggacccggggctgcagcacgccccactgggggacccagggacctgggctgccagtctcttatgtcctgggtaaacagaattctgtgcctctcctttgcctttgcccctgtaaaggacctaggggctccagtcctatcccagttccatcgattatgggcccagattcgggggtcagtccactccccagtaaataactctggtgttccggacttccagttctggcttcacgagtatccacatcgtttgtccccaagtcccacagaaaaacccacaaaatctcattgggcaggcttcctggaatttagggttccaagtctctcctcccccatggatccattggtccctgacccattaagagacaccgaatctggccccctcccacgacacctctcgacaactggacacagaattcgaggccgcagccaggtcccacggtcccagcccccagcgtcgcacagccccgccccctgagtccaagccccgccccgtcaggacccgccccgcccccttcgccgcacctgcgcggtggccgctggcggtcccgagggcagcccgggcgggggcgtgcccaggagaggagcggggggaagccgagccgcacgaacccggccctggggagggtgcgggcgtccgcgcgggcgacggctccggcgacgggccaccggggggcggcgggctgggcgggagcccgtgctccagcaggaaggcgtccaggtctacgtactccacatcgccgaacggcagcgtgcgctcccacagcagtggcgccaacagacccggggcgggcaccggccccgggcgcccccgcggggaccctccgcccaccactgccccagccggggcatccgccgggcccgcagtctccaggcctggcccaggggttgtggctgcaggcagggccgccttgcgctccttttccttcaggagacctgcgggccgggaaagacgggttgggatgagggtgaggtgggggagatagagatggagaagagaccccgagtccgagaggcacagggcggagatccagagaaagaggggacggggggtcggagaggagagacgggagaaaaagggacggagacgcagagtgggagagagacccagaaagaatggagacgggggtggcagagacaggtggacagattcacagagatggggacagaatgccgggaaggaatagacacacagaaagacagcgaaccagagaaagagagacggaagttcaggaataggggggcagggacagggtaggtggagggttgggcaggtgagagaaaaaatgacagctctgtaatttcactgtaattacccaacccccatcccctgcgcgctgtacccccttcccctcccccaccatctgtaaggggcaggaaggggctctattcctggggcacatccctcatccctagactccatgtgaccccatgacgccccgcccaagcccgtgtcaccaccgtgtgagcacccgacacaccccctccctgggaccccaggggtccagactcccggaccaaaaggaagaggaggctggggcctacactcttgtgaactaagcggggaggacgttggggacgttggtgcctgggtccttagggtggacgggcttcagagccggcgcttttgggtcctgggcgctaagggatctaggggcctaaacacctgagtaattgagtagattaaggttgggaagatggactccccgcacgcaggtttctatgggaccccaccccacggcacctgagtccctaagggggtagggtgtccgaagtgggtgagatgggggttagaactcacagctggccggctctttgggcttgctggtcccctgcagaaggctccgcaacccaagcagcgctcccccgccagggggtgtcccggccgggccgcccagcagcagaggggccggggtcctgtcgctcacaggccgcgccatcgcctggcacctgcccccaggctcacgggttcatggagaggcgaagggctggcctgccagtcaccagcacactccagtggtttggacgagtgtctgcccaggggcgggcgagtgtagcctgcaaccctccagtatccagaacgctgcaaatcctaggagcgacggggatttgaggtcctcggtgcagaaacgtgcaactcaagagggtcccgggagatcatgcaatctgggcgagggggtgtccagatcaagcggtcggctctttgcaaccgagggtgagaggggactcaaggcgctccttctacaaggtgggcgagcctggctcttgcaaaatctgcagctctcgcaacggaaggcgctttgcaatctgcaccgagaggtgtgcgcggaggggcggaggagggggcaggaggaggcggccgccttgaggcgtggccaaagcaaacttctttcgcggaaaaaaaaatccaaaccaaaacacccgacgccacagcgcgcgcccctcctccgggtccccgcccggcgcgtccagccccgccagcctctatgggcatgcaacccagccgcgtgcctccctccggctgcaaacacggaccaatcgtctccgacaccttgagacgcacagccaatggggcctctgggtccgccagggcccaggagggcgcgtgaggggctcagcgcgtgaagttgccttgcctttcggtgggaggcgggacactgacctacatttgcccaatgggaggcggtactggggggcgggaccgtgacccagtttgggccaatgaggcaggcgggagggggaagcacatggctctgctcgtgctgcctgatggcgaggggggtgatggggggaaaaggggcgccgcttaaaggggccgcggtcctaaagatggttttgagaagcaggaagccaaaataccgagagcggaggtttagaaagaggaagattggtttccggaagaagtctgttctttaatacccaaatgtttccccaccgcgcctagaatcagaccactgagaaaacaggaagtattctgtccctttaatagctttgttttaggggtaactcccctcgccttgtggggaggcttaggacgggcgggtgcaatcctcgaaggggagtctcagcgaccatgggggacaccatccactgtaagacagagaacaacggcagggggcgtcagtataggatggaaggggcggggggtgtgcagggggcgtgggctgcgccgcgctgggccctaccgtcggaagtctgcgagcggggaaccagaatgtactaggtcgagaagcactgggctgaaccacaagaagccaataggaggggggaatcgggacgtccagattcagcagtaggctgaactacttgaaggtcttcatgggggggggggggtgtggactgtaccatgttgcgaagccgggggtgtgtgagattcctgggctaaaccacagggaggcagaggtggagggaaggggttgtaccttgtagattctcagtaagggggaagggagcatcagattgtggaacagcgtaaggtagtacgacttggaaagggagagaggatccaaattgtaccattttggaaattcacagtaataggaagcacagaacagtaggtaattggaccataggaaggcaggggtcaagggttatagaccaagttacaaagcagtgaagaggaaagacaaatcgtgggctagcaatggcctagggctggcaggtggactgtaccacatagacatgtagggaaagagagaaaaagagacagctcacgaggctagaccatatagacgcaggaaggaggatgggactgaatcacactgagacaccaaggggagacacatataagagggttagcccaagacttagagggggtgcagactggaccataccatgcaggcggtagttggggcctcggcagcgcctctcggggtgccgggggtccctgttgcccctcagtgccctgtgggccaagggctgcaggggccggctgttaccgctgaggctctggaagatctgagatggaggattctggctcaggagtctcagggagtgcatctgcagtggaaggagggtgggaaactgggagtgaatagtgaatggtcttggtgacgtcacgcaggaaaccccgcccctgggagcaggtgggcggggtctgttctcagccccacccacccccaaggtggtctgaccctcttacctacttgagttcagtctatgaggagagggagggcaggtgagcaaggggatgcccaggccagtgagtggagtacccaggcctaggaagggcggtgcggacagagggtcacctgaagggaggtgatattgagggcccggtcaatgaggatccaggtgacagtctcggagcagggcggggtgctgagagagccctgataggtgatgaagccgaaggattcagggaacaggagctccaggctcaggtcttgaagaaagtaggcatcatctgcgggaatatcaggccagagtaaagagggatggcactcttgaaccccctcgtgtgtgaccactgcccccagcacgccagggacttactcttgtaggagatgcgagtgatggtgtcgcggttaaggaggcgactgaggaatgggttagaggtactggcaacctgtgtgggggtacgaggtgaggacacaggagcccagaagtccaagccctcaaccttctcctcccccaggacccaggagtctgggcctcccagcaccccgcttccctcagaccccgggttccaggcacccaactgctccctccctctgaatctcgcctccgctcacgttgacaaagaggctgagaatggccaggccattggggccgcgggaggcagcgctgaaattcccgtagagttcctggttgaagtgaatgagctgcacctgggggtagcacagagcatggggtcccccagcagaaggggaggagagcatgaccccagctttgggggcccgaatcaggctgaggattagtgcttagggtgggaggccagttctgtggaggaggatggggtgagacactaagagggtgaggtgggaggaattggggtgactcagggcggagggtggcgggtaaacaatcagtggccactacctcagcagagaagccctggtggttgatctgatgttccgagccggctccgtcgcgagctccaaacagcagccgcagttcactgagtcggtggctgtaaaggaggggacctccagacacattgaccacaggtcggggtgcaggcaggaaggagacatgtcggccggtgttgtacaaggttccccggagctgtgggagaggcgggagctgtcagggggcagggagagatcttttatctctcgtttcccacgcctacattttctgattccaacagtcttttttttttttttttttttttttgaaacggagtctcgctcttgttgcccaggctggagtgcagtggcgtgatctcggctcaccgcaacctccgcctcccgggttcaagcgattctcctgcctcagccttccgagtagctgggattacaggcatgcgccaccatgcccggctaattttttatttttagtagagacagggtttctccacg[142 bp omitted]ggttggagtgcagtggcgagagctccgctcactgcaagctccgcctcccgggttcacgccattctcctgcctcagcctccagagtggctgggactacaggcgcccgccaccacacccggctaattttttgtatttttaatagagacggggtttcaccgtgttaaccaggatggtctggatctccggacctcgtgatccgcccgcctcagcctcccaaagtgctgggattacaggcatgagccaccgcgcccggctttttgtttttgttttttttttttttaaatagaatctcactctgctgccgaggctggagtgcagtggtgagatctcgcctcactgcaacctctgactcctgggttcaagcgattctcctccctcaggctcccgagtagctgggactacaggtgtgtgccaccacacccagccaatttttgtatttttagtagagacagggtttcactgtgttggccaggctggtctcaaactcctgacctcaggtgttctgcccaccttggcctcccaaagtgctggggttacaggcgtgagccaccgtgcctggcctccaacagtaatttaatcattcaacataatttgaacactgaccactttccaggctctgtgccagtttgtaagttggtgcccaatattggtgaatttgtttgattaacaaatattgactgagctggtgctatgtgccgtggatgcaagaatagagcaataaacaagtagacaaaagtcctgggccttatggagtttatgttctaatgaaggcaagacagacaattgtgaatcacataagtaactgcttaattaactacatcctgagctcatgtttgggggaactgggagctctgaggtgtcatggggagctcagcttagatgggggatgtcaggaaaagcttccctgcaaaggtgacattttatttttatttatttattattttgagacaaagtctcattctggcacccaggctagattgcagtggtgccatcacagctcactgcagcctcaaactcttgggctcaaacgatcctcctgcctcagcctctcaagtagctgggaccacagtcacataccaccatgcccaactaattttcaattttcttttttttttttttttttttttggtagagagggttctccctatgttgcccaggctggtcttaaattcctgggctcaagtcatcatcctgccttagcctctgaaaaatactggaattacacgcatgaagcactgcacctggccaaaggtgacattttaatggggacctgaaggataagcaggggtgacttgcaaaagaacaaagagaagggcattccaagaagagggaacagcaagtgcaaaggccctgaggtggcctgtttgagtaacagcaaagagacttcatcaaagtccagtgaacagaggagagagaggttatgggggctgaatggtgcaggaccttgtggaaaacagtagagagttttgtatttttatttaaataaactgcatatataggctggatgtggtggctcacgcctgtaatcccagcacttcgggaagctgaggtgggcagatcaccagaggtcaggagtttgagaccagcctggccaacatggtgaaaccccatctctactaaaaatacaaaaaccagctgggtgtggcggtgggcgcctgtaatcccagctacttgggaggctgaggcaggagaatcgcttgatcctaggaggcggaggttgcagtgatctgagatcattccattacactccagcctgggcgacagagcgagactccgactcaaaaaataaaataaaataaaaataaataaactgcatatatataacacatttgccagaatgccaaacatatagtaagtgctatgtaaatgtttgctgttattacatatcctaataggaggattttgagcaggagtgatatgatcttatttgtgttttaaacatctctctagctgtggggtgaatagattgcaggaagttgagaggcaggccagtgaggagggtacgccaccagtccaggtgggagatgatggtgcctacatgagactgggggcagtagagggcgtgataggtgaaaggatttgaataatatttagcagcaaggctagaaagaacatggattggaaatggacatgagggagagaggataggatggggaatggctttgaggcttttggctggggcagctaaatgaaaggcagtgccggctcttataagaaatggtattggccaggcgcggtggatcacagctgtaattccagtaccttgggaagccaaggcaaggaggatcacttgaacccaggagttcgacatcagcctggacaacatagtgagaccccacctctacaaaaaacttaaaaagttagccaagcatactggcatgtgcctgcagtcctggcttcttccttcctttccttccttcccttccttccttccttctctctttctctctttctttctcgctctctctctttcttttctctccctctctctctgtatttatttctttctgagatggagtcttgttctgtcacccaggctggagtccagtggcgtgatgtcagctcactgcaacctccgcctcccgggttcaagcaattctcctgcctcagcctctcaagtagctgggattacaggcacatgccaccacacccggctaatttttgtatttttagtagagatggggtttcaccatgttggccaggctgatctcgaactcctaacctcgtgatccacccacctcggcctcccgaagtgctggggttacaggcatgaaccaccacacccaggcatgtcctagctatttttgaggctgaggtaggaagatcacttgggcccaggaatttgaggttacagtgagctatgactgggccactgcactccagcctgggtcacagagtgagatcccaattccaaaaaaaaaaaaaaaaagtatggttcccagcatggtactataaagcaggtcccagcattcatgctacgctgcttggtttgaatgccagtgctggctctctgtgtgatcctaggcaagtaacttaacctctgtgtgtcagtttctgcatgtatataataaggttaataattgtacccattttggctggacgcagtggctcatgcctgtaatcctagcactttgggaggccgaggcaggtggatcacctgaggtcaggagttcaagaccagcctgaccaaaatggagaaaacccatctctgctaaaaatacaaaaaattagctgggcgtgatggtgcgcatgcctgtaatcccaactactcgggaggctggggcaggagaatcgcttgaacctgggaggtggaggttgcagtgagctgagatcacatcattgcactccagcctgggcaacaagagcaaaactccatctcaaaataataataataataataacaataataataattgtacccattttgtggggtggttatgagatgagaggcttatcaaggttttaaatctgcctggcacaggaaatgttctgcttttcattgcttctgcagagatggggagactaggggaccatgcttgggatgggaagaatgggtgatccattttacagtgtaagcagcctcctctccacccactgggtgtcccctcctcccccaaggctgctctcctacctcagcaccccattccccagcctctattcatgcccatccccagtgggttcaatagctcctccctccaagccccttaccttctctcctccagtgctgagccttaatgggggcagaaaggggtcataaagaaccctcttcagctccacatccacggggctctgccgcttccccacagcacacagactccacgctgcattcaccaggccccagaaaggaggccctgggggtggggtcggagtaggaggacaaggagtcagaaatagagactggatcccagggctggtatctgctgagtgggctgtggtctggactcccagatcccaggggaggaggggctagggacctagactcctgggtctgagggaggactgggctcagatccagaattctgggtcctagaagaatcttggaatagtttccaagtttagcagagacgggtttcaccaagttggccaggctggtcttgaactcctgaccacaggtaatccacccacctcggcctcctaaagtgctgggatttcaagcgtgagccaccgcgcccagccgatcaaacccatcttaagccactgtagatggaactacaactcccagcaggccccagtgctaccagcctacccctctgctgcctacctgccccagagccccgtgggagttgtagttcttttttttaatcgctcttatcccacagctggattattattaatgtgttggggagaggagctgcaagagaaggctggacaaggtgggggacggggccacccagcctctggttcctagcaggagccaggaccttcctctcccggcaaacacacacataatctccacccccacactttccttccactcactcccactcactacttgaaatgcgcatgtataatgtcccatggtgagcccctggggttcagaagctggcccgactcctgagggacagaggagggggctgggactcctggtcctgggggggaggagggagctgggaacccaggttcctgagtctgaagaaggaggcgccgggagggccggactcctgggtccccgccttggcggcacctggcacgaagtttccctggagattatccttgtagctccaccagtcctcggggtcaggtgctggtccgatgtgagctgggaagagagcagcctgaatccctctccttggcatccccacctccaccctccctcgggggctcctcccgggaaccccaggtcttacctgctgcccccagtgcagcccagagtaccagcgctcgaggggcgctcagacgagctgcagcccccatccccaggaggcctccgagggacccctgcccaacgccctgcccccctctctcagctcctctgtcccctccttctgggaccctgtccctccaggacttccagctttcctctcctccccacagggagtcccagttccccaaatgccaaagcagccagggactgagatccgcccttcaaacccactcttcttctctctcccgtctctctgtgtctttcctctttcctctgctcttttcccggaaccctccagtctccctctagctcctgatcttcctactcctctcagccttctgctgcccccagggctacctcttggttcctaacccacacctcctctccgttctcttttcattaagctctcccaagccacctaactccaggtctccatcccgcatctcctcctcctcctccctctctcctttccagctcctgcctcttctcccctctctccttcttcacctcctcccgccctccctcagtgtcggcctccagcttcgtgctctccccacctcctcctctcctgcctcttctccctgtttcagtctctcttctctcttgtcccttcctccctcctccccctccctctctcctctcccgtggtgttatttaattttgttgttgggctgggggagcaggtgatctcatagcggcaaacactcctcgggttggcttggggtgggatgtgcgaaagggcaggattcggaaggaggtagggggctggtcctcggctcccagccgcgctggggccacgcgggcgggggtggccgggacacctggggccgggagcaggctgtttccatcctccgcagcaaggggaagggggggcgcttaaggtggagctgggagtggcttcggaagtctccatgctgggggccgccggccttggcggatgcagggtccccctgctcgctgggacccaggttggagccgccccagcgcccgcagccccccttccccgccccagggctccactgggtctctgcctggggctgccttaacggggccgggggatcccctaggagcctgaagtgcagtgagggctgctcgcctggagggggaggcagagacctggcgagggagagaggggcggggaggaggagccgggagggcagaggcggagagcgggaggtgaggacccacatctgcgtaggctggggaggggaagggagcctgagatggatacggagaggaagggcggagggacagaaggttagagaggcaagaacaaaccgccaggcaggagtgaggaggagggggaggaggtgaaggaggagggggaggagggagaggagggggagggagaggagggggaggagggagaggaggagggggagggagagaggaaggaatgaatgagagagatacagatagaggcagaaaaggagatacagagacgcagcgagacagacatggagacatagagacacacacttagagatagacagaaactcagagaccaagcagcagatggggtggggagagacaaaaagagagaaagagcgatccaaagacagagagagacaccacatttttgtatttggggagaagagatggggtcatgctatgttgctcaggctagtctcaaactcctgtcctcaagggatcctcccaccttggcctcccaaagcattgagattacaggcatgaacaaccatacccagcctcagagagaccacatattactgttgttgttgttatttattatttttcaccccgtctaatggtagtgaaactgctcattgtcttcttttattttcttttttgagacaagccttgcaatgtcacccaggctggagagcagtggtgcgatcatggcttgatccagcctcgacctcctgggcttaaacactccttccacctcagcctcccaaatagttgggactacaggcacatgccaccatgccaggctaatttttaaaaattattttttgtagagatgtagtcttgctatgatgcccaggctggtccggaacccctgggctcaagggatcctcctgccttggcctcccaaagtgctgggattacaggtgtgagccaccttgtccagcctgacaccaaacattaacgagacagagagacatagaaagagacacacatacatcagtacaggtggagagagacacagagagggagagacatagaaacacacacacagactgagcatggtggctcacacctgtaatcccagaactctgggaggtcaaggtggatggatcacttgaggccaggagactgagaccagcccggccaacatggccaaatgccatctctactaaatacataaaaacttagccaggcatggtggctcacgcctgtaatcccagcacttagggtggtcgaggtgggtggatcacctgaggtcaggagttcaagaccagcctgaccaaaatggtgcaaccccgtttctactaaaaaatacaaaaactagctgagcgtggtggcacacacctataatcccggctactcaggaggctgagacaggagaatcgcttgaaccgggtaggtggaggctacagtgagccgagatcccaacagtgcactccagcctgggcaacagagtgagactccatctcaaaaaaaaaaaaaaaaagaaagaaagaaagaaacacacacacagagctagagacagagacctgggaacaggcacacacacatctataaatagagacactcgtgcagagaaagagacatcaacagagaggaacagatggacagagatagagagacccagatagagggagagaggaccagaagcagaccaactgacatgatgggagagactacaaaggaatcagaaagacagaggtattcagagatagcaaattgggatggacattcaaagacctagagatggagagagacacccagaaagaaacccagagagtcaggggtggagagagacacgaagaaaaaacacaagaaggaaaggtacatactaataatttattgctggcggggcttggtggttcatgcctgtaatcccagcactttgggaggctgaggagggaggatcacttgagatcaagagtttgagaccagcctgggcaacatagtaagacctcgtctctattttttatgaaaaagaaaaaaacaggccgggcacagtggctcacacctgtaatcctagcactttgggaagctgaagcgggcggatcacgaggtcaggagattgagaccacggtgaaaccccatctctactaaaaatacaaaaaattagccgggcgcggtggcgggcgcctgtagtcccagctcctcgggaggctgaggc[138 bp omitted]ggggaacggcagctcacgcctgtaattccagcactttgggaggccgaggaaggcagatcacttgaggtcaggagtttgagaccagcctgaccaa[137 bp omitted]ggtgaaaccgtgtc[131 bp omitted]gtgtggtgacgcatgcctctagtcccagctgctcgggaggatgaggcatgagaatcacttgaactcaggaagtggaggttgcagtgagccgagatcacaccagtgccctccagcctgggcaaagagtgagactgtctcaaaaacaacgacaaaacaaaacaaaacaacgacaaaaaaatctgttgttgtgtgacaaattaccctaaaactcagtggcttaaaacaacaaacatttattgtgttcacagttcctgagggccaggaatgtgggaatggcttcattgggtggttctggatccttcttgagggtgcagtgaaactgttggacagggctgcagtcatctcaagtcttttatgacctagtctcccaaagtcacacaccttttattccacgcatcagaaatgagtcactagatcta[144 bp omitted]tgaaacctcgtctctattaaaaatacaaaaattggccgggcgtgttggctcacgcttgtaatcccagca[134 bp omitted]gaggcaagagaatggcgtgaacccaggaggcggagcttgcagtgagctgagatcgcgccactgcactccagcctgggtgacagagcaagactgtctcaaaaaaaaaaaaaatacaaaaattagccgagcatggtggcgtgtgcctgtaatcccagctactcaggaggttgaggcaggagaatcgcttgaagctgggaggcagaggttgcagtgagccaatatcgagccattgcattccagcctgggcgacagaatgagaccctgtctaaaaaaaaaaaaaaaaatcctttgctcttgaaaggaaacgtatcacagaatttggggattaattttcaaaccaccacaggtggggagaggaagagagacacagagttgtggagagatggacccttaaagacttgggaggggccgggtgcagtggcttatatctgtaattccagtgctttgggaagctgaggcaggaggatcacttgagcccaggagtttgagaccagcctggacaacacaatgagaacccatctcagcaaaaaaaaaaaaaaaaattttttttttttgagacagagtctagcaccattaccgagactggagtgcagtgatgcaatctcagctcactgcagcctctgcctcctgggttcaagcgattctcccgcctcagcctcccaagtagctaggattacaggagcctgccaccaagcctggctaatattttgtatttttagtagagacagggtttcactatgttggccaggctggtctcgaactcctgacctcatgatccttctgcctcggtctcccaaaatgctgggattacaggtgtgagccaccgtgcctggcctctgcaaaaaattttaaaaaccttgtcaggcatggcagtgcacagttgtagtcccagctacttgggaggctgaggtgaaaggatgacttgagctcaggaggtcgaggctgcagtgagccaagatcacagcattgtactccagcctgggcaacacagcaagacactatctccaacaacaacaaaaaagttaaggatcttgagacgcaatcatcctgcattatctgggtagactctaaatccaatgacaaatgtccttataagagaaaaaaagccatagggagattgggagaaggccgtgtgaagatcgaggcagaggttggaatgaggcagccacaagccaaggaatgccaggagccaccaggagctggaagaggcatgaaacattcgcccctggagtctgtggagggagtatggccttgccaacaccttcattttggacttctgaccccgagagctgtgagacaatacatttctgttgtgataagccatcatgtttgtggtcattttttgtgacagccagcctggggctggggagaaattaagacatggaacctggctgggcgcgatgattcacacctgcaatcccagcactttgggaggctgaggcaggcggactgcttgggctcaggagttcgagaccagcctgggcaacatggcgaaactccatctctatttgtatttagtaaaatttaaaaagaaagaaagaaagaaagacatggagtccgacagaggcagaggcaatgaaggaactagagctatacagaaagtgaaaggctgactgatactgcaagaagagcagactctacctaaaatgtagggctttcctcctccaggaagccttccctgaccgcccccccccccccaggctgggtcagtgcttgctgtgaacattcacaatgtcctgtgctacctccatgagagcatacatcttgttagaaagggactgtgtccccatgtgttccaccggagggcccaagcctgacccgtctctgagtccccagcctcactgcacacagagcctggtgtacggggtcctcaggagagaactcaggcattattgaatgaaaccatgctcatgatgtctttccctggagagtctgccagttcccatgtgcctgggtgacactcgggttttctgcagtgcccatggagggccttgcctcctccaggacgtcttccctgaactgcaagacatggccaggtgcctcttctaggctcccacagtgccctgcgctgcctccattgttgaatatcctaccaaatctcattgtaccaaggtctccctcctaccccaccctcccagactaggcaagtccctagtccgactcaggtcagggtgtcagaattttccagggagaccacaggagaatatgttgaatgaataaataagtgagtgaatgaaataaaaacacagggactgtggcactgagagacaggtgagaaaataatgtttttgtatagggcttaagaggaaggctttggccgggtgtggctcccgcctgtaatcccagcactttgggaggctg[133 bp omitted]gctgaggcaggagaacctgtgaggcagagcttgcagtgagccgagatagcgccactgcactccagcctgggtgacagagcgagattttgtctttaaaaaaaaaaaaaaaaaaaaaaaaaagaggaaggcttcctggtcctggtgtgatctggtgtgttagaacatttgactttcttttttttttttttttttttttttgtgaggcagagtcattctgtcacccaggctggagcacagtggtggcagagtctcatgatctcagctcactgtaacctccaccttagggttcaagcgattctcctgcctcagtctcccaagtagctgggattacaggggcccaccaccacgcccagctaatctttgtatttttagtagagacggagtttcaccatgttggccaggctggtcgctggtcttgaattcctgacctcaggttatctgcccaccttggcctcccaaagtgctgggattacaggtgtgagtcaccgtgcctggccaacatttaacttcctgactatctccataatcctaaccagtgctcaggatgcatcttttcccctcaagtcctccccacagcctccttctcagcttctcccccttccagtttccctccccttgcaatccatgccccacagatcccagagggttttatttttatttttatttttttttgagatggggttttgctttgtcacccaggctggaatgcaatggcgtgatcacagctcactgcaacctcaacttcctgggttcaagtgatcctctcatctcaacctcccaagtagctggtactacaggtgtgtgccaccacacccagctattttttaatttttctttttaaactgtatttacttatttatttatttatttaaacagggtcttgctctgtcacccaggctggagtgcagtgatgtgatcatagctcactcccaggctccagggatcctcttgcctcagcctcccaagtagctggggccacaggtgcatatcacacacccagctaatttctgtttttttgttttgttttgtttttgtttttgtagagacaaggtttcaccgtattgcccacactagtaattttttttttttttttttttgagacagggtttcgatcttgttgcccaggctggagtgcaatggtacgatatcggcttgccgcaacctccgccttctgggttcaagcgattctcctgcctcagcctcccgagtagctgggattacagacatgcgccaccacacccggctgatttcgtatttttagtagagacaggatttctccatgttggtcaggctggtctcgaactcctgacctcaggtgatccgcccgccttggccttccaaagtgctaggattataggcgtgagccaccgcgccaggccaacacactagtcattttttatttttttgtagcgatagaggtctcactatgctggctgggctggtcttgaactcctggcctcaagcagtcctcccaccttggcctcccaaagtgctgggattacaggcgagagccaccctgagtggttgtgttacattcagagtggaccctgcctctcccacggctcccctgcacctctggacagagtccccctcctcagcctttcttgtcgtgaccagattcttctaatgtccttgaagatccacctgtgagagaagttttctgacctgtaggctgggtttggggtactctctgggctcccccagtgagctgagccacctcaatgatgatgatgattgcccgtatcactctgttttaacacggtttgtctctcacacaaagctgattctgcccctcccctgctcacagacctcccatggctcctcagtgccctgggggaaaaaaacccaggtcctcagcctggtctgagagaacccacatgccctggccacccccagtccccagcctcatctcttctctcaccacagagacctcctgccctgggatctttgccaaactgtttcctctaactgggctccctttctcccttctctgctgggcaaattcctactcagacttctgcacacttcaggagtcccctcctccaagaagccatctggcaatgccacgaggtgggcaggggcctcctcagagctctggaagccacctgtgctgcctccattatagcgcaaagacagactgggctcggtgcccagagggggagggaacgaccaggccggaggtgggtcccagatgtggatttcatgcctattcgtctcgggtgctgggaacaaagtttgggtcatgaggaacatatggggcctgctctgcaccatgctttcatctcctatctccccagcccctgagtgggaggcggcagcgccaggcctctacaggcctgggtggttcccacagcccctcttggcctcctcactgctatctctttgccttcaactcccactgcccctgggagcctagaaaaatcctccttgatctatactctcgccttctgggttccagtctcctggaggaggtgtggactgtggactctgggtgtttaaattttatatatatatatatatatatatagagagagagagagagagagagagagaaagaaagaaagagagagagagagagagacaagagtcttgctctgttgccaggctggagtgcagtggcgcaattttggctcactgcaacctccacctcctgggttcaagcgattctcctgcctcagcctctagagtagctgggactacagctgtgcaccaccatgcctagctaatttttcttctttttctttctttcttttttttttttttttttgttgttgttgagaagaagtcttgctctgtcgcccaggctggagtgtagtggtgtgatctcagctcactgcaacccacctcccaggttcaagcaattctcctgtctcagcctcccgaggagctgggactacaggcgcacgccaccacacccagctactttttgtatttttagtagagacagggtttcaccatgttggtgaggctggtctcgaactcctgacctcaggtgatctgcccacctcggccctccaaagtgctaggattacaggcatgaaccaccgtgcccagcctattttttctgtgtttagtagagacggggtttcaccat[132 bp omitted]cagtggctcacgcctggtgatgggattacccagcactttgggaggctgaggcaagaggattgcttgagctcaggagttcaaagccagcctgggcaacagcaaaaccttgcctctatttaaaaaaaaataaaaacaaaaaaaaacctagcctggtggcttgcgcctgtagtcctagctacttgggaggctgaggcaggaggatcccttgagcctgggaggttgaggctgcattgggctgcaattgtgtcactgcattcctgcctggaagacagagtgagaccctatctcaaaataaataaataaataataaactcatacagctgtcagtctgcactaggcactgttctaagcccattatatatattaactcatttaatcctcaaaacgtaccctgtagattattttctattattttattatcatcctcatattatagatgagaaaactgagcgatgtggctcagcagggctgggatttgtggttttgttgtttgttttttgttttttttttttttgagatggggtctcgctgtgttgcccaagctggagagcagtggcatgatctcggctcactgcaacctccacctcctcgatccaagcgattctcctgcctcagcctcccgagtagctgggattacaggtgtgcaccaccgggcctggctaattttggggggatttttttgtttttgttttgttttgtttttttctgttttttgtttgtttgttttggctttttgtttgtttttttctgtctagcggaggttgcagtgagccgagatcatgccactatactccagcctgggcaacagagcgagaatgtctcaaaacaaacaaacaaacaagagaccttgagatggggaagagattattctggattatctgggtggccccatctcccatccaagaactaacagggtctgaccctgcttagcttctgagatcagacaagatcgggttcattcagggtggtatggcggtagaccgggtgcccctcgtctaattacaggagtccttaaaagcagagaacctttcccagccatggtcagaaagagatgtgaggatagaagaggcaggaaaaatctgaaatgtgaaagggactcgacctgtcgtggttggccgtgaagatggaaaaaggggtcatgaatcaggcaatgtgggtggcctctagaaactgggaatagaaaggaaacagattctctcttagaggctccagatggaatgcagcctcgttagcaccttgattttagcccagtgaaacccatgtgaggcttttgatctgtagcgtgtaagatgataaatttgtgttgtttcagctgctgagtttatggtaatttgttatggcagtaacaggaaaggaattcgacagttctctgttactgagcacgtgagggaattctacgtccccaccttcatacaactgagtggaaccacatgagtaatcccgatgaatgagctgtgattggaagggccgggagtcgttcctggaccaaagctgttttgcttgcataagaccattcagtgcttttcctctttccttgtctcagtgatcaaggatgccctgggttacgggtggtgctacaaggtggtgaacatctctcagcctgggtccttgactgtgtggaaaaccaacctttgccaacttgcatggaacatgtatatgaacaagaaagaaactttgtgttttctttttctttttcttttctttctttcttcttcttcttttttttttttttttttttttgagacaaggtcttgctctgtcaaccagtttggagtattgtggcccaatcatagttccctgcagtctggacctcctggactcaaacaattctcctgcctcagcctcccaagtatgaggactacaggcaggcacacaccacaatgcccagctaatttttgtattttttgtagagatggagtatcaccatggtgcccacgctggtctagacctgggctcaagtgatcaccagcctcagcctcctaaagtgctgagattacaggcatgagccaccacacccagccagaactcaataaactccatagagccaacagagctagcctaagctgcctaatggaaggtctcaatgaagtaaggaaactggcttgccataacatgaaaaggtgtgttccaggaagagaacagcaagtgcaaaggtcctggagcagagtgtgcttttttttttcctttgagacggagtcttgctctattgcccaggctggagtgcagtggtgtgatctcagctcactgcaagccccacctccctggttcacgccattctcctgcctcagcctccagagtagctgggactacaggcgcccatcacc[186 bp omitted]ggctgcagtgatgtgaatgaggaagacttataagaggtgaggtcggtgatgtggtggaggtagatcatgcagggctttgtggggcagggcagggactttgggttttattttgagagtgatgggaagccattcaagagtttattttttgtgttttgttttttgtttttttctgcattaaaaaatgcagaagaaaaaaaagagtttatttttagcgatggggtctcactctgttgcccaggttggagtgcggtgccacgatcatagctcactgcagcctccgactcctggattcaagcaatcctctgcctcagcctcccaagtagctgggactacaggtatgcaccaccatgtccagctaattttttttttttttttgtagagatggggttttgctatgttaccacgtttgctggtcttgaactcctggcttcaagtgattcccacctcagcttcccaaagtgctggggttaccggcatgagccaccatgtctgtcctgacatgatttaaagtgatcatcctggcttccatgtgaagaagactttcagggggtagtgatgagagtagtgtggggactattgtaataatccggacgagcagtgatggtggtttggacaaaggtggtagcaacagagatggtaaaaatggttgaattatgggagatattttgtggatgtggacaggatttgctcatggattggatatgaaggtggagtatgggggcagtgaatgcccaactgaattggcttcaagagaggatgaaaataacaaagataaggaatatagt[134 bp omitted]catggggaaacccgtctctactaaaaatacaaaaattagccgagcatggtggctcgtgcctgtgatcccagctactcaggagactgaggcaggagaatcgcttgaacctgggaggcggagactgcagtgagccaagatcactccactgcactccagcctgggtgacacagtgagactccatctcagaaaaaaaaaaaaaaaagaaagaaagaaaagaaagaaaagaaaagaaaagaaaatcccttaagactggtcgcagttgctcatgcctgtaatcccaacgctttgggaggctgaggcaggaggattgcttgagctcagggggtcgagaccagcctgggcatcatagtgagaccccatctctactaaaaaagaaaagaaaagaaaatcccttaaaagactcctacttcagagatgaccccaccctgggttcatcgggaggctaagggcaggttctcccagattatgtaacattttattggtggcatgggggtcaaatagtctccctggaggcaatttcttgcctttttccatctaaccaagagcaaacccagaacgtttgctggaaggcacctttctccctacctggtatcctgtgacatcatggcatatcctgactccccattggctgagaggcccagctttctctcagagaaggaaattattaggcaacacaaatctgactagcacccagttacatcataggagtgtgcttattgtattggccactttgttccaggtccaaatggacctcaggacagcgcggtggctcacgcctataaacccaccactttggcaggccaaggtggaaggatcacttgagcccaggagttcgagaccagcctgggcaacatagcgagacctcgtctctaccaacaacaaaattagccaggcatggtggcctgcgcctgtggtcccggctacttgagaggctgaggtgggaggattgcttgagcccagtaggtcaaggctgcagtgagctaccatagagccactgcactccagcctgggcaacagagtgagacccagtctcaaaaaactaaataattaaaataaaataaaataaaaaattttggctgggcacagtggcttatgcctgtaatcccagcactttgggaggcctaggtgggcggatcacctgaggtcaggagttcgagaccagcctgagcaatgtggtgaaaccccatctctactaaaaatacaaaattagccaggcgtggtggcacgcacctgtagtcccagctatttgggaggctgaggcaggagaactgcttgaaccggggaggtggaggttgcagtgagccgagatcatgccattgcactccagcctgggcaacaagagcaaaactccatctcaaaaaaataagtaagtaaatataactataaataaaataatttttttaaaaaagagttagaaacaaacaaatggaccttaaatcacatcccttcctctaagactccctgagtaccccctcagtgactctcctgaaaagatcacccaaatttgagattatgttgtttgctgtgggtgcaggggcaggggtcagggtggcaaggaaggtcccaggctgtggcaaccttccattccgtggtacttaccgcttcctgccttttgcgcccctcccctctggcgtgcaggccaattgttgagtgggaatacaattctgcttagcaccaagttatgtcataccactctgtggcttccgattggctattctttcaaaaatgagtcactcaaagtatctcaattcctttctcagagcctatcctgaggcccatcagaaaccaacagttcctacgtctggaattttctagaaatctggaactgctgtccctccctttgtgagatttcccgccttttccaaccaagccccgcccattggccttcggcctatcgtcaggcaacaccaatctgactagcacccaatgacgtcataagagcgttcttattggattggccactttgtcagggtcccgttgtgctgtggtcctaacttcagctccgcgtattgattcaaggccttgttcgcttccctctagagagtgtgccagcatcgatcaggggtctgtagacaaaaattcccaaagatttgagactttattgggggaaacagatcactggcggggaataagccacaggccaaaggaggaaatgttgggaccagaagtcccgcttgccgccttttgctaaaagttccgcacgcctgctcggcgtgggcgcaagcatagtgtcgtcggggctctgcgacgtctgattggctctctgcagtgcaccgtcgaggtagaaggctcagctcctagtcgctcccaaattactttgttggtgctcgaggcagccccatctcacgtctagtgctccggcctgggactgggtgtgggtgcccgcacgccgcggcagcctccggcgcgctcctcctgctgcagccgcttcaggggccgggcccagcgcggcctccatggcagcgcgaggccgtggcggtcgaggatgaggcgcgtggggtcggggtcgcccacggcgctgcccagcagcaggtagtcggtgcctggctgcaggcgcaggcagccgcaggtcaggtcggcgcggggcacccaggcgtcctggtcgccgcgtcgcacgggctgcgcccgctgcttgtaaacggccagcacgcgcacggccagccgctgccatgccgggcccgccgcctcggacgctagcacctgcgcgcggagaactgtggggaggggagatgtcagcccaggtcgtggggagcttccagggtacctctgggtcccgtggggtcagtcacagtgggcaggagcccgagaccggtgggtgggcttctggtatcgcagtggggagagaaaccttgaaccttggagagtttgaccctaaatcgtgaggggtagagcctgctggaggaaacatctttgagataaggagttaaactatagtaggtggggctggggacagggcagaagaggcaggtccagggtctctaatgcagtggagtcagaaggtatcaatggtggaattcttgggaaggaggggtcacattgccgggggaggggctctgggataaatttcgaggaccagaagaaggaagagactggtccctggaatgtgagggctgaggtcatactgatagtgattcagaaaaacataaattttttttttgagacggaatcttactctattgcccagtctggagtgcagtggtgtgatctcaactcactgcagcctctgcctcccaggttgaagtgattcttgtgcctcagctgggtttacaggatcctgccaccacgcctggctaatttttgtatttttagtagagatggagtttcaccatgttggccaggctggtctcgaactcctgacctcaagtgatccgcccacctcggcccccacaaagtgctgggattattagcatgagccaccgcgcccggccagaaaaatgcactttctgagaggctgggtgggactctgactagccagctgggtctgcggggcaggagatccctgtggaaggtggggaaaatctttccacctgtgaaggcctagaacactagtgaccagatgaggttcctgagggagaagtctgcggtcctatacattgagagaaatagctggcgttggtctagatttgttggctgggccgaactcctgagtgtcttaagagagctgaatagcctgaggtcatagaccccaaggtcatggagcaggtgtggactggggattagggaaccgtgggacaagtctttatgggaagtggggctaaggctcaaatatctgggaccatgaagggaagcagaaagggtctctgagatagggaggacagggcaagagttcattccactcaaccagttcccctatctcttccatccctcagagatgtcaggctgaaggagatgatgaaactctgtaagccgaagaacatggggaaagaggagacacaggaaggtagtgaatgccccctccccactcccctccccatttgtcttctgccccatcaatttctagatcaggaaggggtttggaatccaacactccttcccatttaagatgagaaagtggaaggccagaaagggggtggcttagaagcagtcatcagaaccagctgtgtagccttcagctgtctgtctccccagcactcaccatggtcctgctggcagtacctccgaaggctcatgtgtaccctggtgtccgacatattgcagtagttttgacactgagggtctggggagggtcaggctgtctgcagtgggctcctggggcctagaccacagccttctgcccctgcccatccctccgttccatcttgatggccagctggggtacccaaacctttgggactgggctcaatgggtgacccatgtatccccatctggggacccagtcagcccatcctcattcccacttgccactcagggacctccgtgccagactgtcttaccagagctataagcaccaggagtagtggcaagggtggttgttgcctctggaattcctgtgagaccaaaggagaaattaacctcttagtcatttcccccaggatcccctcgcccctgccccgggaatccaggcacccaaactcttaagtgtttattcctttaggactcaagagtgcaagcatcccttgccttcaggccccaagcctccttttcctcaagagtccagaatttcagtccctgcttatccgagggcccagagtccagcctccagccttgggctcccaattcccaaggccccagccctcactgcagctgtgcactggagacctgggatgtctccttcccgctctactcaggcttgtggcctggcccctcaagacttacgctggcagggcatcctgggggagcggctctgctggtagccagggccacagcggttgcaggtcaggcctgtgacccctaacttgcaggtgcactgcccactggtctggttgcaggttcctcctgttgccccaatagggtggcactggcaggctacatgagcagaggagctgggggcatggggtatcagggccccagatgcccctcccaattccacagtgcctcctccctcagcctggggagtccaggcccccagcccctcttccctcagacccaggagtccaggcccccagcccctcctccctcaggcccagagtccaggcccccagcccctcctccctcagatccaggaatccaggcccccagcccctcctccctcagccccaggagtccagccctacctctgctccccccaggcctgtctgcaggccacactcacctctgcaggccctgcggctgaagataggctggctagggtccctccagaacccaggttggcagtagtggcagtgccgcccagctgtgtggtggcggcaccgctcacaaacacccccactccggccgcccgacagtctgaacagctcagagttgaaccggcagcgtcgggcgtgctggttgcaggagcaggctaggagcaaaatggggtgggggcgcatcagggccgagtgtgctgctccccagtcctcagctttcttcccatggccctgccctcatgaaaggaagccgtgagtgtccaaggtagaagagaatgcctgggtcccaggacatctctattattatcttttttttttgagacggagactcactctgtcacccaggctggagtgcagtggcgcgacctcagctcactgcaacctccacttcccaggttcaagcgattctcctgcctcagcctccc[136 bp omitted]gcctgtaatcccagcactttgggaggccaaggtaggtggatcacctgaggtcaggagttcgagacccacatggccaacatggcgaaaacccatctctactaaaaataaaaaaattagttggctgtgatggcttgtgcctgtagtcccagctactcgggaggctgaggcaggagaatctcctgaacccgggaggtggaggttgcagtgagccaagattgcaccactgcactccagcctgggcaaaggagcaagactccatctcaaaaaaaaaaaaaaaaggtacattggactggagctggtaagtccggggggactcatgaacctcctgaacatctgtgaaactgggcctctaaagagtaggctgcatccaggcacgatggctcgtgcctgtaatcctagcactttgggaggccaaggtgggcagatcacctgaggttaggagttcaaaaccagcctggccagcgtggtgaaaccgtctctactaaaaatacaaaaattagctgggcgtggtggcacgcgcctgtaatcccaggtactcaggaggctgaggcaggagaattgcttgaacccaggaggtggaggttgcagtgagccgagatcacgccactgcactccagccagggtgacagagcaagactccatctcagaaaaaaaaaaaacaaaaagagtgggctatggcctgtggaatcagacccttttagccttgtcggtctctctgaccgtattccctggacaggtaatttatcccttctgtagtttgattggctgtgaaatggcatttataatgtttacttgaggcttaaatgagataaagtggataaaaagtgcatagcccaggcctggcggagagcaagtacttggctgtctagcattcgtacgtgcaggacaccctgcactgtgtttgatgtatttcatctccacaagggctctgtgaggctggcactattatcatccccattttacagagggagaaagctgaggcacagagaggtacagctagcgggtagttggaggcaggacttaaacacaggtcttctagcttgacagtctgagctcttagctcactccagtaatacacagctcccgtgaggattatttagcatgtgcattatcctgggagcgtttgtcaggtgttttaaggtggctctcaaaccttactgctcatcagaattaccagggaaatgttttgttgttgtttttattaaaaatacattaacagggcatagtggcccacacctgtaagtcccagctactctagaggctgaggtgggaggatcacttgagcctgggagttggaggctgcagtgagttatgattgcaccactgcactccagcctgggcaacagagtgagaccttgtctttaaaaaagaagcaaaaatccaaaacaacaacaaaagccagattgcaaggctcctccctaggctttctgatgggcccaaggatctgtatttcca[132 bp omitted]acagcctccaactcctgggctcaagggatcttcccacctcagcctcctcggtagctgggtccacaggcatgcaccaccacaccaggctactttaaaattttttttttaaagacggggactcattatgtctcccaggctcatggacactctttgaagagacttggactgcagggtgttttgacactaagaggtttgagagccctggactggcaggtccctgagagcccggaagagttgtgggataatcagggagctcagacggctgcatgttcttggaaaaacaactccccctctcccagcctctgttttctccctgtccagagagaatccagatccctctctcccagggtttttgtgggcattcaaagtggcaaagctattcagatgatcagtgagttgagtcaggttttggattctttctgacccaagggtaatcgttttgcctcacttcccctgtggagaactcagatgagggagaggagatgcagaccaggatgtctgtgaagcccatagctctgccacaggcattagtctcacctggccaccctgacctttctccactgcagcattgtcagtctcttacccgggtttggagggcactgccctgctcagtctggggggatgtggtgaccctcaggacagcctccccagcgcccaggccctgtccaggcccaggatgaaggctgcctcatcctcaggcctggtgagtctcacccctcactcccctgcttaggtaaaagatttggccaaagaatggggatggtctgtaagttagcccatgtgatcttcatgtatgaagaaatagaggggcagaggccgggcgcggtggctcacgcctgtaatcccaacattttgggaggccaaggctggcagatcacctgaggtcaggagtttgagaccaacctggccaacatggcgaaacctcatctctactagaaatacaaaattagccgggcgtggtggcacacacctgtaatcccagctactcgggaggctgagataagagaatggcttgaaccccagaggcagaggctacagtgagccgagatggcgccactgcactccagcctgggtgacagagcaagactccatctcaaaagaaaaaaaaaagaaatagagggccgggaggcaaagcgcatgggaggtggagagggaaggccagggtacacttgcacacgtgtgtatatgtctgtgtctgttggtagagttacctcccaggacctcagaccctgtaccaagtgtctcaggctggaggagggagggggtcagggccggaaggagctgacaccggctgtctctgaggaggggctgttggagggaggtagggaaggcctggtctggaagcacctgtgggaaagagggcatcgcatgggacattcctggggggcccctgtccagctggatggagcagcggattgttgcagcatctaggaactcagggctccctgggttaaatcccttgctggcaatgagacttagggcaagtgacctctctttgagcctcaccttcctcagctggggagtggcgactttggcaggtgctcaggaagccgttcctttgtgccaggtaccacattgggctttatttaaaggctttatgtgtattaatgcatttaattttcactacagcctgtaaaggatgtgctgttactatccccaatctatggtggaggaaactggggcaccaaaagattaggtcacttgcccaaggtctcacagcaggtaagcagaggagctgggattcaagcccaaatagtctggctgccaggccaccaaggccgtgctcctgtctgttgcctcttgtctgccacgtggtgtgacagtacccagcaggagcctggcagggacaggctgagaccccagaacttggcttcctgagctcagatcctggccctgccacacgcagccactgtgtgtccttgtgcaggggacttctgaactctaggcctgagtctcctcatctgtaaaatgggcctgatgacatccctgcctggcacacgtaggtgactgataaatatgtgtttaatgaccgaatactttccccctgtggttggtttgaggagtcaggtaccatccagctgtcctgttcccctacaactgttcaataaatattacccaagtacctgcatccagccaggccctgggatgggtgctcggaaactgttattacatcatcatcaccaccaccatcatcatcaccactatcaccaccatcatcaccactatcaccatcaccatcatcaccactatcaccaccatcatcaccactatcactatcatcaccaccaccatcaccatcaccaccaccaccactatcaccatcatcaccaccaccatcaccactatcaccatcatcaccaccaccaccatcatcatatcaccatcatcaccaccatcaccaccaccaccatcaccaccatgaccaccatcatcaccaccatcaccatcaccaccaccaccaccacgaccatcatcaccaccaccaccatcaccaccaccacgaccatcatcaccaccaccaccatcaccaccaccatcaccaccaccaccatcaccaccaccatcaccaccaccaccatcaccaccaccaccatcaccaccaccatcaccaccaccaccatcaccaccaccatcaccaccaccaccatcaccaccaccatcaccaccatcaccaccaccaccaccatcaccaccatgaccaccatcatcaccaccatcaccaccatcaccatcaccaccaccacgaccatcatcaccaccaccaccatcaccaccaccatcaccaccaccaccatcaccaccaccatcaccaccatcaccaccacgaccaccatcaccaccaccaccatcatcaccaccatcaccaccaccagtcatcaccatcaccaccaccaacaccaccaccatcaccatcatcaccaccatcaccaccaccatcatcaccatcaccaccatcaccaccaccaccaccatcaccatcaccaccaccatcaccatcgtcaccactaccatcaccatcacaccaccaccatcaccatcaccaccatcatcaccatcaccaccaccaccatcaccatcaccaccactaccatcaccaccaccatcaccatcatcaccactaccatcaccatcaccaccaccatcaccaccaccaccatcaccatcatcaccactaccatcaccatcaccaccaccatcaccatcaccaccatcatcaccatcatcaccaccaccatcaccatcaccaccatcatcaccaccaccatcaccaccacagtcatcaccattatcaccaccaccatcaccaccatcatcaccattaccaccatcacaccatcatcatcatcatcaccatcatcacaggctgatgagtgttggggagaggctgagcccctcatgagcagacaggcccatgtgtggctgagatacaggactggctgcagggaggaggtatgaggggaccgagtctgagactggggtgagaggcaaggagcacccagttccagcgagggaagggaacatcctgctcccgtagggacaaaggacccagtggcaggcaggcaaaggcagggagagtgaggggcgcaggactcacgtaggcaagggtgggggtgccggggcgtggcaggccgccagggccagtctcgatgggacgggcggcagctctcgcaccccgggccagtggtatggtggcggcagtggcagcgggggggccgggcacgggcggcacagcgggcagcgtggccatgacactggcagcggcctctcagcccagctgccgctagcccggcctggcccccaaactccacacggaggtggctggccgccacagtggccttaggacctggtgtggagtggaaggtcaccctttcagggccccctaaggccccaggccaggcgggcctgtgccacagcagcctccagggaccccctgaggcccaggcagcagacaggatgagggctgggggtcctggggtacagaagcgcaagctgacagatgtcaggaggaaggggccacccagggccaaagtcaggctgccattgcaggtttccctggcgccaaggtggtttcctggggacagggcacaggcctgagggcaggaggccgccacggcagccagctgtgtcactggcgggaggcagaattgggggcggccctgtggatcgtagcatgggtccgcagtggcctggcccaggaggagcaggagggcaaaggtcacgggcatggtcacagcagagccagcacctggagggaagagaggtggctgggctggggatctcagccgcagcctctacccctcctggaggtgtcctgtggaactggggcattccacccccaacccgtccaggccccctccccggctgcatggaagcgaggaaaatagttccatctggggagaattactgtttacataacccaaaggggaaagaacgcagacaaaatcgagaattttgcctgaactaatccgtagcttaacaccccagagttatccgtcagtgtcgaggggcagggggccctggggagcggtgagcggctggagcagaggggctggccaaggccagcagacgtggaaacctagagagggacacagagacaagcagggctgggcaggagagggggcttagggacagatgaagactcagtcacaaagaaatagaggacaggacagaggcagagagaggacagtcagcctaggggaggcgctcggcacagagaagttgctgcaaagacagaggaacagacaggaggctgagaggctgagacagaggccaggcacccagaggccacagggagctgggagactgaggctcggactgcctgggggctgggataggtgggcaggtgggctcagagacacccagcctggcaggccctggggaggggagggaaggggacaggctaggggtgtctggcgggggatcagaagtgagagaccgaggcccaggcctgcagggatcagagccattgcctttcccacatggggccctaaccttgttctccacaccctgggcacggaaggggattatcaccaaacaacccagcctccctgccacccgcccacccacccccagcgccccacccttaaccctttcccacccgagtgcaaagcccagagagctgagctgaggaaagggatgctgggagctggaacctgggtggctctggggcttgggagcgggacagtgggatccccatggggtcaggggaagcagacacctgggttcccttcagaactcagggtgtggggaccggaagttagcgttctgggactttctgctcacctcaaccctgccctctattctgggcctcagggcctggagaccagagtccccacattctccacccatccagagttccccagagcagatgggggaacagatgttgggggcggtgggtaatgaggaggagagaggcaggaaggcaggagctgggacagggtggggtgccagatgccagggcgcccgtgggggcagaagcccagaccctaggaatggcaggagctgggaaggactggactctgaaatgcccccactttccccttccagggccagcagcctctggtgaggagctcactgtggactgggggcctcggagcctttccaggcccttggctctgaatctgcgcccaggaatgtccctgggctgggcatctctggggcaccctggcggttgaggtgggccacacctgccccagcctggcctcactgcccatgtccccactgctgttggccacatgcagacgctgcctcccctggcccagatgacaggcctcgccctccgccctcccaaggagcctggcgccattttgcacccactcaggtggcagccgcctgcctggccctcagcagcatcctgttaagggccagtcccccatgtcccctttctctctggatagttgctggatagttcagggggtggcaccctctggcccttagcaccttgaggaaccaggctgtgagttccctagtgttcctgggggatccagaaaccagtcgtggcccacagagagcccatacccctctttaagaaagagtccagccatgctcccagcagactcataggaggcctgcctgggcggcctggggtccatctgggacccaggcttcctttccctggctcttggcatgcaccccccaacccgagccctgaggccccgacattggccaaacctgcactcaagaagagagcgtcctgcagccagttccccgcaggctcttcctccaagctgtggcgcggtgggctctcaggagggagtggcgtggctgttctcaggccccaggctagtggggtttctgggctgggcgggggctcagagcagagcccgcagaatctaacaccgccacccccctcccaccccaatccctcaccaaccgcagccacgctatccccacagggacccctgccagccaggccacccgcaacggtgtgggacgtgagtgccgttgcccccggcggtccagcagcaggacagccccgagcagcctggcctaggaggctcaccgcaggtaggacgggaggctgtcagtcgggggtcccgctccatcccactccacccctgcccactggctcagccccgccttgtggtggccgccatcgcgatcgggcaggggctgacctttgggagacaatcgctgttggaaactttgctcagcccctgcctctggctgcgtgaccccaagccagcccctcctcctcctctctggaaccttttgtcagctgtgggttcaccgagccttaaggtcagtaaaatctgtgctcttggaaggttcagaccagcccctggaattcaaaagacctcagtcgctttctaagatggtggggaaggcgacaaatgagctgagaacacctgggccccagtgtttctcatgcggcagagggagaaggcggggacccccggggtgcgggggaccaagctcaaaagcacctccccagtgccgctggtgtcctgcgagtcctcagtgctttcatcgtgacattttcatgcgaatgttgctgtctgttctattccatctccgaatgggttgactagaaaaataatgttttctgtcacttcccgctgagaaaagcaagggcctcatggagttggggcgcggcacctgctgccctgggtggccccagcgtttatcgtggtgtagcgtgggcccaatcctgacaggcttgggacccactgccccaggcccgcccccagggggtgcgagggcacagcaaaggcgaccctcgactctggacccttaggtaccacgttggagggggccagatttggcaggagcaggacagggacatcggatttgaaagaagggagtcactccgaaagctgggaggtgcatcagctgcaggaggatggaatggggctgagacgccccccatcagagggggcatgtcagagctgggggcccaggctgtgtgagtcagagtggaacttcgggattcaggcgcaggtccctccgctgaccctgcctgagctccccctgtatgggactttgccgggggttcgcgctgggaacacagacccctgccccatcaggctcagtgtccagagagggagggggagaccccagcagcgcaggtccttctgtgctctaggttgttggaaggtgccaagtgccttggagcaaagcaagtggggggggcggccacgggggcccggggattgcagatgtaagtggggtgatgcggaggggcatttgtgctgagcccaccgccagcacagaacccagctttgctgccacacaaaactgaggaagaaggcttaggtctcgctgcgtcttcctccccacctgggcgaagtctcaagctccggctcctggagggaagcttttgttccttgcagcttgagctgcctgagttgatgggcgcccctgcgggtgcccgggggcaggcggggaagaacagacggagctgccacagccgagcacatagtgccccaagctgggaaggagactgttttttttgttggggagagttctttaagggctggagaccttcaccctcacagcttctacagaaggccaggcctgcccaaggcacatctctgaggtgggttcaacccagagagaacctcagtgctgggctcacacagacctctaacccctgccttggtggcccagatataacggagtctccacgaggcagggcaggtcacccgcaggagttactgggcattgtgtggctgggtagggcctgccctcccggacatgttcaaaaaggccaggatggtaaccccagccatactgcctgggttcaaatccacctctgtcctagctgtgtgaccgagaacaagcttcttaacctctctgtgccttcatttcctcatctgttaaatgaggaagaaagaatggaccttcctcatggtgggcggagggggtcatgaggactgaatgagctgacatgcccacgggttcttatctgagctctctgggaaagtcgtgttccggaaccttctgcttcctggccctgttgtcggatgcatagtacgtacgtgacatggcatccatggtaggtctgggccgcatcacattgtcaaacatgttatgttttaggcagcagagcacatgggtgttcacagtaagagaagtaaagtctgcaaatagccacatgaccctcctccaagccagggttgtccccagatgagttcagtccaggttggcgtttgccgctccccctgaggaaaatggctgacaaggaatcgcggaccaggacagccagccccgtgatgggcctgcccgccagcaccctcgcagcctcggccttggctggtgcttttctgcggctttctggttgtctaggctgagaacagccacaagagggagcacctgagattccaggagaagccagagcagccgcggtacccactgcttgatctgcagggcctgggggaaaatgcagacacaggaccccttgtttagaatttatgaaggattttaagacggcaacaccagatcattaaagcaagcgtggggcctgtctcagcgcaactgcacgagtcacacaaaatgaaggcggaccccgcggggggcacccttgtcctgagctggtttcccttggccagtgacccaggctcctgtccctgccctgcacccccactgaccccagctctagccttgggacctgcctgggggctccagctgggctcagagctcagctccttctccgtggggcaggaccctgagttgagtggatggcaagatcatgtttgggacacagttttcaccagctcagtgaaaaaaggcttgggcagatttaattcactttttgcaaactaaagcagcaccaggagcatttttcttaggccttaggccagctggccttgctggggacccacacgagactttcaaggagggccccagagtgttcaggcttctcagaagggtcagatgaaccaaatgaggagccctggaatagaggaggatgacagctgaagaggcctggagggccccagattgttcaggcttctcagaagggccagatgaaccaaatgaggagccctggaatagaggaggatgacagttgaagaggcctgtaggcccccgatgtttaagaggacaggcggagggagagatggggagccgggaggggtgaggcagaagccagaagttttaggggtgagcccatgccaaccagggcttcagcaggaatggggtgggagggagggggtgaagggatgactgctgagctgtagccattggagtggccacagggaaaccataggacattggtcagaggagtggacaaggggagaagagaaagccgatcaggacatggtagaggctgggagcagaggaccttctgggagccctggggagagctggaggagactcggaaagagcagcccccggagaagggaccatccatcccacggcgaggaccgggaccgaggtccttggagcccagtcaggcccagtggtcagggctggacctggaggtgaataggtgtgggccccacggtgagatggccctgcacacccaccacaaccaaacacgacggcgagcgaggctgggaaatggggccttcccgtactgctggtggaaacggaaactggggcagccacctggcagctcccaaaacgattcaacgtagagttcaccctgtgacccagcacacaggttcgtggcagcactatttgcaacagccgaaaactggaaacaactccagtgcctatcacctgatgagtgaatacattgtggtctacctggacaatgggactttcagtcttgaaaggagtgaggcaattatctgggcgtggtggctgtacctgtagtcctacctgtagtcccagctactcgggaggctgacgcaggagaatcactgaaacccaggaggtagaagttgcagtgagccgagattgcgccattgcactccagcctgagcgacagagtgagacaccgtctcaaaaaaagaaaaagaaaagaaaggcgtgaggctgtgacacgtgctatagtgtggatggaccttgaaacacggtgccgagtgaggaagccagactcggaaggccatggagtgtgtgattgcagtcacatgaaaaatcgagaataggcaaatccataaagacagaaaggagattacttggtggggggacaaggaacagggaagattgtggggagatggttaaagggtgtgggtttttttgggaggggggctatgcaaatattcaaaaattgattgtgctggttgcacagctctgtaaatatactaaaagccattaaatcgcacaccttacgtgggtgaatggtagggtatattaattatatctcaaagtggttgccaaaaaagagctggctggacgtggtggctcacgcctgtaatctcagcactttgggaggctgaggtgagtggatcacctgaggtcaagtgttccagaccagcctggccaacatggtgaaactttgtctctactaaaaatacaaaaattagctgggcgtggtggcgggtgcctgtagtcccacctacttgggaggctgatgcaggagaatcgcttgaacccaggaggcagaggttgcagtgagccgagatcacaccactgcactccagcaagggcaacagagcaaaaactccatcataaaaaaaaaaaagaaaagaaaagaaaagaaaaaaatgaataatcataaccctacatacaaaagctaaaactggcccatgcctataatctcagtactttgggaggccaaggcaggaggattgcttgagcccaggagttcaagaccagcctgggaaacacagtgagaccccatctctacaaaaaatgtaagaattagcggggcatggtggcacatgcctgtggtgccagctactggggaggctgaggtggaaggatcccttgagcccagctgtgatcagaccactggcactccatcctaggtgacagagtgagaacctgtctcaaaaaacaaaagctgaactctccagcttgacacgatagtgcagagggaacattctcaaggcaagacatgaaagctgttagttctttaagtcctgggccagaaatggacacaatttcacttgcactatattaaagtggtcaaggcagtcatgggcccgcccagatccaagggaaagggagtccaggagtctgtggtggcttgaacccaccacacccactaatagtatcaggaaacgcttagcacttatcagtgcaggggtgtggcagccccatttcttggaggaggagaggaggagttaaataacacctccaggtcaccagcctgcagaaggcagagcctgtccatgaacttgggcccacctgtgctctttcccaaactctgcacgggcaccaaagattcttacctgttttttcctctgctggcttcctggccctgagcaccgtgcctggcattgtaataaatactctgcaagtattgattttatttatgttatttttattttttttgagacagtctcgttctgtcacccaggctggagtgcagtggcacaatctcggctcactgcaaactccacctcctgggttcaagcgattctcctgcctcagcttcctgagtagctgggattacaggcacccgccaccatgcccggctaatttttgtatttttagtggagatggggttttgccatgttggccaggctggtctcaagctcctgaccttaggtgatccgcccaccttggcctcccgaagtgctgggattacaggtgtgaaccaccgtgcccagccactgcaggtattgattttccaacacatacagggcatttcctgtgtgcgaggcactgctttacaaaatcatcacatttaatcttcaagcaaccccatgaggtagttctgtgaggtagaatcatagaaatggccgtgagtaggccaggcacggtggctcatgcctgtaatcccaccactttgggaggctgaggcgggtggatcacgaggtcaagagttcgagaccagcctggccaccatggtgaaaccccgtctctactaagaatacaaaaattagccagggttggcagtgcatgcatgtaatcccaactactcaggaggctgaggcaggagaatcgcttgaacccgggaggcggaggttgcagtgagccaagatcgtgccactgcacttcagcctgggtgacaaagcaagactccatcgccaaaaaaaaaaaaaaaaagaaatggccatgagtgtaggtaaaatcgggttaaatattggcactttcaaatagttccatctactcatccccatttaacaggtgaggaaacagactcagagaaactcagtaacttcttgttgtttttgagacagggtcttgctctgttgcccaggctggggtgcgggggcacaatcacagttgactgcagcctcaacctcctgggctcaagcaatcctcccacctcagcctcccaagtagctgggaccacaggtgcatgccaccatgcttgactaattttaaaaaaaattttttttttttgtaaagatagggtctcactttttttgctcaagctggtcttgaacttgggctcaagtgatcctcccatctcagcctcccaaagtgccaggattacaggcacaagccgctgtgctcagcgaggtgcagtaacttgactgaagtcacaaggtgctggtgaggctgggacttccagcaggaactcagcctcaggtggaaagaccccagggtctgtgctctgaggcctctcccatgcactgtggtgctcaggacagaggcttggatggattgagtgagtgaatgaatgactttggcagggggtgggtgaagagactcctgtccccccagccctgcctcctgaccatgtcctctctcctccccacagccgtcaagggattctgggccacccgcccttccttctccaccttctacttcgtctttgccatttttgtggtgtccaccatctttcactgccaccagcacctggctctggtgcctgcgccctgggcatactcagcccgtgtggtcctggcccccagacacctgccccgggaggacctgttcactatcaactccaagggccgcctggggaaccagatgggcgagtacgccacgctgtacgccctggccaagatgaacgggcggcccgccttcatcccggcccagatgcacagcaccctggcccccatcttcagaatcaccctgccggtgctgcacagcgccacggccagcaggatcccctggcagaactaccacctgaacgactggatggaggaggagtaccgccacatcccggggcgctgtgtccgcctcacgggctacccctgctcctggaccttctaccaccacctccgccaggagatcctccaggagttcaccctgcacgaccacgtgcgcgaggaggcccagaagttcctgcggggcctgcaggccaagtgggcagggcaggcgaccttcgtgggggtccacgtgcgccggggggactatgtccgtgtcatgccgcgcgtatggaagggggtgctggccgaccggctacctgcagcgggccctggactggttccgggcctgctgccgcctcccggtctttgtggtcaccagcgatgacatggcctggtgccgggagagcatcaacagctcccttggggacgtggtgttcgctggcaatggcctccagggctcacctgccaaggacttcgcactgctcacacagtgcaaccacaccatcatcaccgtgggcaccttcggggtctgggccgcgtacctcgcgggcggggacactgtctacctggccaacttcaccctgcccaactcccctttcaacgtggtctttaggccgtaagcggccttcctgccagagtgggtgggccttgcggctgaccttggacaggctggacagaacggcctctagccagccctgcatgtgcctggtcctcatcctgtgacccgaggggcagtgagtggggcgtgcggggcatggactcacggtccctcatgcagtttggatccaggcttatctacttcatagctgagtgagtttggacaactgactcaacctctgtgccttagtatgtcaaccacaaaatgcacaaaccacagaactaaacaccagtagcagctggtgggagctgagcaaattcgcttagagccagtgccttgtgaccgtgtgggaggtgtcggctgctcacatgtatgcagcacgtcaggaacactggcattgctttccaatggaaacgcagttttgccctctccttcctggcagcactggtagcacagagcccagatattttgcactcacgtcccaggacgaagccatccctgccctgaaggataggggaactcgattttctgggcaactaggaattttggctttggagttagtgggccttatcacaaaagaatgtgagggaagggccgggtgcggtggcacgcctgtaatcccagccctttgggaagccaaggctggtggatcacttgaggtcaggagttcgagaccagcctggccaacatggcgaaacccagtctctactaaaaatacaaaaagccaggcacggtggtgcgtgcccctaatcccagctactccggaggctgaagcaggaggatagcttgaattgggaagcagaggttgcagtaaaccgagatcataccactgcactccagcctgggccacagagcgagactccatcgcaaaaaaaaaaaaaaaaatagaattccagggaagacaggatttgcagggacacacctatgaggagggattcccctgcgatggacaggggaggggtttaggtgcaggtagcaccctgggcgcagggaagaaggcgtcacagtgagggcagaaaagacactcctcagatcctggaagcagcaacctgacccccaggggccactaagaccaaatcatggccatctcagcagcagcgtgtgtgacagttactggaaaaagatacctcacacctggcactgcctaacccccgagaacctaatgccactctgagaaagctcagtacgggtgcaagttggattaagtaattgcagtgcgagttttcctgtgttttattggtgtaatgctccttttggacattaaaaaaacttgacatatacaatgatcatttacatgcattaaacatttccaccaaatgtaggtgcagtggtttagaaaacattccaatcacatctctttcccatttgaaaccttttcaaggttgggtgcagtggctcatttctgtaatcccaacactttgagagctgagttggagggggatcccttgagcccaggagttcgagaccagcctgggaaacatattgaaacctcatctctacaaaaattagctgtgcctggtggcacacacccatggtcccagataatcaggaggctgaggtgggaggatcacctgagcttgggaggttgaggctgcagtgagccatgatcacaccactgtactccagcctgggcaacagaataagaccctgtctcaataaaattaaataaataaataaataaattgcttgcagctggtgccaaggaatggtagtctcccagtagacagaaaacacccgaagctggccaggtgtggtggctcacgcctataatcccagcacttgggggcccgaggtgggcggatcacctgaggtcaggagttcaagaccagcctggccaacgtggcgaaaccctgtctctaataaaaatacaaaaattaggccgggcacggtggctcatgcctgtaatcgagcactttgggaagccgagcctggcggatcacgaattcaggagatcaagaccatcctggctaacaaggtgaaaccccgtctctactaaaaaaaagaaaaaatacaaaaaaattagccgggcgtggtgg[134 bp omitted]tcaaaaaaaaaaaaaattagccggtgtggtgatgcgcgcctgtaatcccagctatttgggaggctgaggcaggagaatcgcttgaacctgggaggtggaggttgcagcgagctgagatcgcgccattgcactccagcctgggcaacaagagagaaactccatctcaaaaaaagaaaaagaaaagaaaacacccgaagctggtgatcagcagcttcccaataagatcttgggagttcggcgagtgggcacaagcatgtgcactaagaggcaaaatagcagagtttaattggtacatgacctcctggggacattcagtgggtaagggaagaacgcttcaagtgagcacgcgtataacttcagtaaacacactgcgcatgctccccacccaggcgctggtaggccaccgcctaagtgaacagcccaccccaagggaggaactggggagaagggacgcaagaccccagaagtgtgccaacatataaaaccccaactcaaaaggtcaaactgcacacttgtctttcatgtcgcccgcttagccctcttccaagtgtactttcattccttttgtccctgctctaaagcttttcaataaactttctctcctgctctaaatgagagcctattgcccaggctgccttggtctttccttctgcctattcccctcagtcgaattctttcttcttaggagacaagaattgaggttgctgcagacccacacggatttgctgccagtaacagggtttgggcttgggaggtgttaaagaacacaggaggggccaggcacggtggctcatgcctgtaatcccagcactttgggaggcc[133 bp omitted]gaggcaggagaatcgcttgaacccaggaggcagaggttgctgtgagctgagatcgcgccactgcactccagcctggtgacagagtgagactccgtctcaaagaaaaaaaaaaaaaaactcaggaggagggctgagtgcgatggctctttcgcccaggctggagtgcagtggcgccatctcagctcactgcaacctccgcctcctgggttcaagcagtcctcccacctcagcctcccaagtgggattttaggcacccgctgccacatccagctgatttttgtatttttagtagagatggggttttgccattttggccaggctggtctgaccgcaagtgatccttccacctcggcctcccaaacttctgggatgacaggcgtgagccactgtgcccagccaacagctttcacattacaaaagcccaagcagaagctggcaagctgccaacaagctgcactaattcatcaataaatatttactgagtttcttactgcatttgcaaattccaaagcagaagttggacagacacctaaaagcccgccctgtccctcaccagaaggggacaaaaggaagctgagcaggacaggggccacttaagtcccctaaagaaggggattgcataccccagcacctcagacagtatccagtgcacagcacatgttccttatggtttgacttgtgacgagtccccggccaagtttccttgtttcatttttttgagacagagactctctctgtcacccaggctagagagcagtggtgcgatctcagcccactgcaacctccgcctcccaggttcaagtgattctcttgcctcagcttcctgagtagcttggactacaggcacctgccaccactccctgctaatttttgtatttttagtagagatggggtctcaccatg[132 bp omitted]ccaagtaggacctcagtccgtcacccaggctggagtgcagtggcacaatctcggttcactgcaacctccgcctcccaggttcaagtgattctcctgcctcagcctcctgagtagctgagataacaggagcacaccaccatgcctggctaattttttgtatgttcagtagagatggggtttcaccatgttgtccaggctggtctggaactcctgacctcaagtgatccgcccacctcggcctcccaaattgcggggattacaggcatgagccaccgtgcccagccctggtcagtcttgaggtctgtgttgatgttaaacactggtcagctgagcctgaattacaatggcaggagggtataatgaggcatgtccagccacccagtcccatcctgggctgaactagtgtttcaggtttactttagaatgcccttggtctagagggagggtccattcagttacctgggggactgagaattttatttgtggtttacagtaagataattgtaggtgtaactggttaagtccaggttatactggagtagggtgtgtggtgtccctaatccgttatgacgggtgaccacacagacaccaaagaaaggaaagccacatgatgacaaaggcagagattaactctgggcctccagaactaagggagaacgggctgggcgtgatgactcacacctgtaattccagcactttgggaggccgaggcaggtgggtcacctgaggtcagaagtttgaggccagcctgcctaacatggcgaaaccccatctctactaaaaacacaaaaattagccgggcgtgatggtgtatgcctgtaaccgcagctgcttgggaggctgaggtgggagaattgcttaaacaggaggcggaggctgcagtgagccaagatcactccaacctgggagacagagtgagaccctgtctcaaaaaaaaaaaaaaaaaaagaaaaaagaaaaactaaaggagaatgattttcttttgctttgagggacccagttgtgtgttaccttcttagagcaaccggggaaacacatagaacgtctaatgcatattaattgaatggattgtacaaacagagcgaaaagagaaccccatggcttagcaggaaagcagcttagagatgaaaggtttcagtgtccttggcacagggctagtagtcctggagatgatttcatggacactgtcccaggaagtaaaattctggaaatactttcattcattcaacaatatggtcatgggtcacttaacaatagggatgtgttctgagaaatgtattattaggcaatttcatgttgtatgaacatcatagagtatatttacacaaacccagatggggtgtgtgtgtgtatatatatattaaattcattttttttaatatggaaaacgaaatctccgagcaccattattgaatatcagtcatctcctgtacttcatctgcaatgccaatacaaagtgccagagatgaggtttctatatatgctctattataatattttattcgtttatttttgagacacagtctcgctctgtcacccaggttggtgtgcagtggtgcaaacacaactcactgcaacctctgcctcccgggctcaagtgctcctcctgcctcagcctcccgagtagctgggaccacaggcactcactgccacacttggctaatttttgtatattttttttaaagatggggtctcactatgttgcccaggctggtcttgaactcctgggtttaagggatcctcttgcctcagcctcccaaagtgctgagttataggcgtgagccaccgcacccagcctatttatttatttttgagacagagtcttgctctgtcacccaagctggactgcagtggctcgatctcagctcaccgcaacctctgcctcctgggctcaagagattcttgtgcctcagccatctgagtagctgggatttacaggcgtgctccaccatgcctggctaatttttgtatttttagtagagatggggttcaccatgtttcccaggctagtctcaaattcctggcctcaagtgatccaccctcctctgcctcccaaagcgctgggatgacaggcgtaagccaccgggcccagccaaattttaaagaaaacaggatatcaatttatatctcaaggcaaagagaaagaatgtaagttcttttgttgtttttgagattggttctccctctgttgcccagtctgatctcaaacacctgacctcaagagatcctcccacctccagcccccaaagtgttgcgattgtaggcgtgctggcctactttctgttctggttttctttcttttcttttctttttttccttttttttgagacagtttcactctttttgcccaggctggagtgcaatggcacgatctcggctcaccaccacctccgcctcccgggttcaggtgattctcctgcctcagcctcctgagtagctgggattacaatcacccaccaccatgcccggctaattttgcatttttagtagagatggggtggtgggggggcagggggtgtttctccatgttggtcaggctggtctggaactcccgaactcagatgatccgcccgcctcggtctcccaaagtgctgcgattacaggtgtgagccaccgctcccggccctactttctgttttttaactggattactgagtccatttacagataaagccgagaaagcacgtggagtttccaggactggcctaagcctcacctatagaaaaagcaggcacagctggaaggcagagctcttggatcccagaaatcacggatcccattcctaggctgaatccctgatcccctagaccagtggcaaagcccaagagggaaatgcccagggacaggctgttaaaagctcccacactcagcctgggctgcaaggcacactttactgtcagttctgcttggctcagtcagaaatctgagttttttcttatctcaatgcatgaagaaatgaggaggataaaatttgcccactgtggtaataaccattcattccaaccttgtcagttatcttcaaaattgtagctattgacagtaactacttagttatcccatgaccaaaggtcaagtgttttcttaccttagaaagtaaccctcctgggcccggtgtggtggctcacgtctgtaatcccagcactttgggagaccaaggcgggtggatcacctgaggtcgggagttcagaaccagcctgaccaacatggagaaaccccgtctctactaaaaatacaaaattagccgggcgtggtggcacatgcctgtaatcctaactactcggtgggctgaggcaggagaatcgcttgaacccgggaggcggaggttgtagtgagccgagattgtgccattgcactccagcctgggcaacaagagcaagactctctctcaaaaaaaaagagaagaaagtaacccttggaccttcaaaagccaaagagatcagggagtttagtgcaaaagagagcagaggattagaccccaccctcgactcttggggctccgtgaggaagacagaagaccccaaaaaggaagtctgtggtgctttggctgagctcctcaaggaggctcagaatcactaaaagtctcttttttattttatatatattttttattattatactttaagttctagggtacatgtgcacaacgtgcaggtttgttacatatgcatacatgtgccatgttggtgtgctgcacccattaactcgtctcttttaaatctcttcatgtgctattgaaggagacaaaaggaagaaagagtggaggtagatggggaaacaagtcttttttttctttttttgagacaaggtcttgctctgtcgctcaggctggagtgcagtgccaccatcgtgactcactgcagcctctatctcctgggctcaagtgatcttcccacctcagcctccaaagtagctgggaccacaggcatacaccaccatgcccggctattttccacatttttagaaggcttggcgtggtggctcatgcctgtaatcccagcactttgggaggccaggacaggtggatcacctgagatcagcctgaccaacttggtgaaacccccgtctctactaaaaatgcaaaaattagccgggcgtggtggcgcacgcctgtaatcccagctactcgggaggctgaggcaggagaatcgctagaacctgggtggcagaggttgcagtgagccgagattgtgccattgtactccagcctgggcaacaagagggaaactctgtcttggaataaataaataaataaaaataaataaaataataataaataaaattttggcagagatggctcttgctgtgttgtccagggtgctcttgaactcctggcctcaagcgatccttcagcctcagcctcccacagtgctgggattacaggcatgagtcaccacactcggcccatcaatttattttataagcaaactggttcacatacgttttttcccgttaatccagttttggaaagggaaaaaaaccaagacttttaccacctttactggaccgggtcccacaggcagagatccaaggagctggtaagaaatctcacctttttctgccagctatttatcatttgtcccagaaaaccatctgtaggctccgaaacaagagtgatttgatttgcatcctgctcacagtgccagaactgcggggaagttaaaatgtttcccctggaggttaaaacatttgagtctatataaatcaaactaataatagccagatagcaggagaaaggaatacacattttatcatgtgcacacaggactcacagaaaatacgcaaactcagagaaagggccagatagctgaagttgttttttgagacagagtttcactcttgttccccaggctggagtgcaatggtgcgatctcggctcaccacaacccctgcctcccgggttcaagcgattctccctcctcagcctcctgaatagctgagattacaggcatgcgccaccatgcccggctaattttgtatttttagtagagatgggatttctccatg[138 bp omitted]taaagaagaatcaggacttggagactggtgagacaggttatggaagagagagaagaaaggcctggctacggagggctgtcttttaatgcagatgaaaccctgatgggtaggggctctcagaaagaataaactttcttttctttttatttgagatggagtttccctcctgttgcccaagctgaagtacagtggcatgatttcagctcactgcagccacccctcctgagttcaagcgattctcctgcttcaccctcccaagcagctggtattacaggcgcatgccaccaagctcggttacttttttgtatttttagtggaagacagtttc[133 bp omitted]tgccctgtcacccaggctggagtgcagtggtgcgatctcagctcactgcaacctctgcctcctgggctcaagtgattctcattcctcagccttctgaatagatgggattacagatgtgcaccaccatgcccagctaatttttgcattttttgtaggcacagggttttactatgttgcccaggctgctctcgaacttcagccctcacatgattcacctgcctcggcctcccaaagtgctgtgattataggcgtgagccacctcaccccgcccgtccagaaagagtaaatttctttcttttttctttttctttttttttttttttttttgagacaagtctcgctctgtagcccaggctggagtgcaagtggctcgatcttggctcactgcaagctctacctcccgggttcacaccattcttctgcctaagcctcctgagtaggtgggactacaggcgcccaccaccacgcctggctactttttgtagttttagtagagacggggttt[215 bp omitted]gcctcagcctcccgagtagctgggactacaggtgcccgccaccatgcccagctaatttaaaaaaattttttttaaatttttagtagagatgggggtttcaccatgttagccacgacggtctcgatctcttgacctcatgatccgcccacctcagcctcccaaagtgctgggtgggattataggcgtgagccaccgtgcccggcctttttttcgttttgttttttgagatggagtctcaccctgtcacccaggctggagtgcaatggcacgatattggctcagtgcaacctctgcctcccaggttcaagcaattctgcttcagcctcccgagtagctgggattacaggcacagccaccatgcccggctaattttttgtatctagtagagacaggatttcaccagggttggccaggctgttctcaaactcctgacctcatgatcagcccgccaccctctcaaagtgctgggattacaggtgtgagccactgcacctaatctaatcttttataactgtcaatctaatcttataactgtatgttagcctttgtatgcaaaatgctgtcattctgctcacgatctccattttttgttgttgttgttgttggttttttgtttgttttgtttgtttgtttgttttagacagagtcttgctcttttgcccaggctggagtgcagtggtgcgatctcggaacactgaaacctccaccccaccccgcctctgcctcccaggttcaagcaattcttctgcctcagcctcccaggtagctgagattacaggtgctcaccaccacacagccagctaatttttgtatttttttttttttagtagagacagggcttcactatgttgaccaggctggtctcaaactcgtgacctcaaacgatctacctgccttggcctcccaaagtgctgggattacaggcattagccactgcgtttgacctctccatttttacctgtataaatgagttccacttttccccatactggaagcactgatcaccattcttcggtgtccttgtgtccctggacagccaccctcacacacttgtgtttaaaaaaacttttcttatttttttcttgagatggagtctcgttctgtcacccaggctggagtgcagtggcgtgatctcagctcactgcaacctccacctcccaggttcaagcaattctcatgcctcagcttcccgagtagctgggactacaggtgtgcaccaccacacccaggtaatttttgtatttttagtagagactgggttacagcatgttagccaggctggtctcgaactcccggtctcaagcaatctgcctgcctcagcttcccaaagtgctgagattacaggcgtgaacaactgtgcccagatttattttttaatttttcagaggcagggtctttctctgtcactcaggctggagtgcagcgtcaggatcatagctgacgctggacctcctgggctcctcttgcctcagcctctcaagtagctgggactacagacatgtgccaccatgtctggctaattttctttattttttgtagagagacaaggtcttgctatgttgcccaggctggtctttaacttctggcttcaagctatgctcctgcctcagcctcctgagtagctgagattacaggtgcatgcctccatgcctggccaccacggccaatttcaagctaccaatatgagatcattgaacatgcaattggaaagaaatgcacagtattacattgttctatagcaagcctattacacagacataataaatgtaaataggccaggcaagatggttcatacctgtaatcccagcactttgggaggctgaggcaggaggatcgctttgagctcaggagttcgaggccagcctgggtaacatagtgagaccccatctctacaaaaaaacacaaaattaactgagtgtggtgacgggcacctgtagtcccagctactcaggaggccaaggcaggagactcatttgagcccaggaggcggaggttgcagtgagcacatacattgattggcacacagattggcagatactaacatacagtgtgtttttttctccagagaactggctggtaagtgtttaccatagtaagaagacttactatagaacaatgtattactgtgcgtttctttccaattccatgttcaatgatctcttattggtagcttgaaattggccgtggtggccaagcatgggggcgtgcaccagtaagggaaagctgaaatggaaaacagagggtttagggcaacagtcctgaattccggagtgctgtccccctgggggagttatgggaatctgtgggggttgtttttagttgtcacagtggaggtcctaggatgctaccacagcgtttacgcggctggggtcagcgacaataaaagttacgcaatgaaggtttgtcctgcattctcaggactttgttttatttttgagacagagtcttgctctgtcacccaggctggagtgcagtggtaccatctcggctcactgcaacctctgcctcccaggttcaaggaattctcctcccctagcctcctgagtagctgggattacaggcgtgcaccaccatgcccagctaattttgtatttttagtagagatggagtttcactaaaaaaaaatgttggctaggctggtctcaaactcctgacctcaggtgatcctcctgcctcggcctcccaaagtgctgggattgcaggcatgagccactgcgcccaggtcattcccatgactttggaacatctgtgggacattcatggagttggaaagtctaagcctctgagccccaaatctgttttgcgttttttttttttttttttttttgagagggagtcttgctctgtcgcccaggctggagtgcagtggtgtgacctcggctcactgcaagctccgcccccggggttcacgccattctcctgcctcagcctcccaagtagctgggactacaggcacccaccaccacgcccggctaattttttttttatatatatttttagtagagacggggtttcactg[137 bp omitted]cgccccaccctgtttcttttttccttgtcgctgaatcacagggaaacaggtcgtttgtcctgtggacgggctcacattctggactgggctgattgctgcctcatggtgtcgtttcactgggaactttgtcctcctgttttctgcaaactggtggttagagtgggaagcttgatctgatttttttgtttgtttgtttgaagggagctccgtagctggtaggtagcctcctgctgcttagctgaagctggggagtggctgctggtttctctttcctcctgttaggactgctgggagctctggtggtgcctgcctcttctctcagtaaaattcctcatccatcttttttttttttgagacagagttttgctcttgtttcccaggctggagtgcaatggtgtaatctcagtttactgcaacctccgcctcccaagttcaagcgattctcctgcctcagcctcccaagtagctgggattacaggtgcatgccaccacgccccactgatttttgcatttttagtagagacagggtttc[133 bp omitted]gggtttcaccttgttggccaggctggtctctgactcctgacctcagttgatccgcctgcctcggcctcccaaagtgctagaattacaggtgtgagtcaccacaccgggcccatttgtatttaaaaatttttttgaaataggcagggcgaggtggctcacgtctgtaatcccagcactttgggaagctgaggcaggagaatcccttgaacttgtgaggcggcggttgcagtgagctgagatcacgccattgcactccagcctgggcaacaagagcaaaactctctcaaaaagtaatactactaataattaattaataaataaatataagactctgaggggactcagagtcagcgagagcctggcctagcaggactctgtcccccgcctccatgctgccttcctggaggccttcctggctgcctggaggagcggagcagagtgggggcccctttctgttggggcatcacaacagttccccaaggaagaccctcggggacccggatgggggatgcgaccttgtcctgcctctctcccccacccttatggccaggcttggggtgcctggtgcaggtggaggagctaagggtagataacaagatggactttgtggccggcaatggggagggaggaggggctacgggctcacctccctcccgcagcccagccacacctgctctggaaagccctgtagctcctgggcggggtttgccagtcaccgatgctggaagggtttctttggccctgagtgaagagagacccagagggaacactgaggtgcctgcccaaccactctgtcccggtttccttcagcaggaccaggtgagagaaggtgagggggctcctctcccaccctacaacacgcacacctctgcacacacgcccaggcggagagcagggatttgggacgtggacctgtgtgccctcgtgggtccctggtgccctctgggaggcacccccaactcaggacctccaggagaggagggtccctccctcggcagccaggacccccctccccagccagccgccctccttagctccctccccacttccttccaggtggatctgtttctagagctccaaccaccagctccctccccttctccaccccgggccaccaggtccttccttgtctccttcccctcagcagtttctatgaaccaccctggcagtaatggtgcagatggctcgcgcacagctggtggtgacccgactttcctgcctccaccctggggctcctcagaggcttcatggaacccaaactgctggtctcacctccgagccctgccgtcgcccagggagggcggctccgtccctcctgcactccctaatcccgctctgaatcaccgcttctgttctgggtcggagaataaaggtggggtttccaagtgatggccctacgttattgtctgaagctcccttctcctccccagggtggaagtgataatgccgggaatccgggaatcccggggaggtgcaggaagacagcgagctcgaggcagtggggtgcgactgagccggatgtgctgagctgcccggggcacggggcggttggggtagagaaaggctttcagagctgggggacaggacggggccccgggtgagcggagagctgggttatttcacgggaacagctggtgacaaagccggaggggtgtgcggggccggcgagagactgggattgtgtcttaagaggcatagggagccctgaaggggctgcgagctgggaaggggcagggccggcgctgggtgtaggggacagaggggagaggag[133 bp omitted]gagaaaccccgtctctactaaaaatacaaaattagccaggcgtggtggtgcatgcctgtaatcccagctactcgggaggctgaggcaggagaatcgtttgaacccgggaggcggaggttgtggtgagccgagattgtgccattgcactccagcctggggaacaagagcaaaactccgtctcaaaaaaaaaaaaaaaaaaaaaaatctcagtaagatagaccaggtgtggtgtctcatgcctgtaatcccagcactttgggaggctgaggaaggagaacagaggacctcctgaggccaggagtttgagatcagtgtgggccacatagcaagaccccctccccaccatccctacaaaaaaagcaattcaaaaaaaataatgccttcaggcagaatgggagtggtgcttggttcaagcctgacataagtgtgagtttggggcacaaattctgctctgaataccagggacagcccatgtaatacagcatttccctttgtgcccacgcagccctaagggaggtgtggtttgttgttgttgttgtatctttttgagatggatttttgctcttgttgcccaggctggcatgcaatggtacaatctcggctcactgcaacctccgcctcccaggttcaagcgattctccttcctcagcctcccaagtagctgagattacagtcatgagccaccatgcctggctaattttttgtatttagtagaaatggggtttcaccatattagtcaggctggtctcgaactcctgacctcaggtgatccacccgcctcagcctaccaaagtgctgggattacaggcatgagccactgcactggctcttttttttttttttttttttttttgagacggagtctcactgtgttgtgcaggctggagtgcaatggtgtgatctcagctcactgaaacctctggggaggtgttgtttttatccctccccacaaccccctgttgatggacagacaaggacaatgaaacacagagaggtaaaagccctgggttaaagtcacacagcacataaaaggttcctgatcatgccgtgcagggcatctcgccaaacctcaaaaattcacaatctcatagcgcagcttgctctgtgaggcctccccacctcttccttctctccttccaggctccagtcaaggtcagtgcccagcttcctgctctgggccactcagcagccaccttcctccttcctgggtaaggaggtagggagctaccaaggaggcagggacatccgtgtagaacattctgcttttcttttttctttttttttaagatagagcctgactctgtcgcccaggctggagtgcagctgtagtgtaatggcacaatcgcagctcaccacaacctccatctcccaggttcaagtggttctcctgcctcagcctcctgagtagctgtgattacaggcatgtgccaccacgcctggctaatttttgtatttttagtagcgacggggtttctccatgttggtcaggctgctttcaaactcctgacctcaggtgatccgcccccgcttggcctcccaaagtgctggaattacaggcgtgagccactgcgcctggcctaattttctctaaaatagagacaagttctcactatgtggtccaggctgatctcgaactcctgaactcaagcaatcctcccagctcagcctcccaaagtgctagcattacatgtgtgagccatcatgcctggtccctgtctgtttcattctccctgtctctctagtcctgcctctctctgtgtcttctggtctttttctctatttgtctcttcctctgtcccttttatcatctctgtcccttccctccctccctccctcccttccttccttccttccttccataggtgagaaaaagtagcatcttttcctcacctatcacaaagtttgcagctggggcacctacagtaaaaggttaacagacacaagcataacaaatgtatttaaggcaagtgttgacatgggagccttcagaaatgaaggcctaaagaaacag[136 bp omitted]ctcaacctccccagtagctgggattacaggtgcgcgccaccatgcccagctaatttttgtatttttagtagagaaggggtttcactatgttggccagactggtctcgaactgctgacctcaggtgatccacccactttggcttctggaagttctggcattacaggcgtgagccactgtgcccggctacctcccgttctatgatctatggtttaaacgctacatttgaccactatcaatactcccagtatcaaaactgggaaacctgggttcttcacccagagcctaaaacgaacagcattctttgccttgtgggtgacaatagcaaacatttaccgcctgtgtatatgtgccagacactgttttaatcctcagagaggtgatgtcacttgcccaaaatcacacagctcgtgactgtgagtctgaaattggccagagcttgtgcacctagccactggtggtgatgtgtctttgagtcatcgagtccagcattctgtgttggacttagtgaaaggatatact[137 bp omitted]catggtaaaaccccgtccgactaaaaatacaaaaattagccaggtgtggtggtgcacacctgtaatcccagctactcaggaggctgaggcaagagaattgcttgaacccaggaggcggaggttgcagtaagccaagatggcgccactgcactccagcctgggtgacagagcaagactccatctcaaaaaaaaaaaaaaaaaaaaaagaaaaggaaaagaagtgaactggttcaaagaccataatcatacatatcacacaagactgcaagcggaccagggtcagttaatttagcggctccacaaagtcatcagtcacctgagctccatccatcttcacatgctgtgctaccatttattttattttatttttttttttgagacggagtctcgctctgtctcccaggctggagtgcagtggcgcgatctcggctcaccgcaagttgcgcctcccaggttcatgccattctcctgcctcaacctcctgagtagctgggactataggcgcccaccaccacac[187 bp omitted]gctgctacacatccagccatcacatgcagataatttctttcaaaaacagcagaaagaggctcgttcttgtcttggtcccttttgaagaatgaatgaaaccttcctaagccttccagcaactccccccacaactccgatgggtaggaattgtcacataaccatgtggcccgataggaggcaaaagaaatgagacttctgggattagtttagcctcagattctgcagctgagaagttgatcagccacctctgaaggacaagcagcttgcagaaaattagggtggtgttaccaaggagaaaaggggaaatggctttagagtagacaacagggatgccctgaggggttgtgtaggttgttcactgcacgaagtcccctggtcaagaaggtaagcggggtttaaacagacccacagtctactcatcaaaccaggtgtccttggcattgtgtccacccagagagctcactattttcttttcttttcttttctttttttgaaatggagtcttgctgtgtcccccaggctggagtgcagtggcatgatcttggctcactgcagcctccgcctcccgggttcaagcaattctcctgcctcagcctcccgagttcaagcaattctcctgcctcagcctcccgagtagctgggattacgggcgtccgccaccacacctggctaatttttgtatttttagtagagacagggccttg[144 bp omitted]tggccgatgaatgggaagtccacggtggagctgggtgttcctctcaagttcaactggctgcggccaggagggcaggcaggccaggtggacaatttcccttcaaagtggatacaggcaggacatgcaaagatgaatatctctggcactggactctggcaagtaggaaaataaaaacaaaagatgaacatcttgggccgggcgcggtggctcacatctgtaatcccagcactttgcgaggc[133 bp omitted]tgagacaggagtatagcttgaacctgggaggcagaggttgcagtgagcagagatcgtgccattgcactccagcctgggtgacagagattccatttcaaaaaaaaagaacatctctacaaactggatcaccagtaaataatagctacatatacttgtactcaccatatgtggacacccacatatgtacactcagtcgataaacacccacatttaaacataccatgtgggccaggtgcagtggctcacgcctataatctgagcactttgggaggccaaggtgggaagatcacttgggcctaggagtttgagaccagcctgaccaacatactgagaccttatctctacaaaagagaatttgtttttagttagctgggcgtggtgatgtgcacctgtagtcccaactactcgggaggctaaggcaggaggattgcttgagcctaggaggtcaaggctacagtgagccacgttctcaccactgcactccagcccaggtggcagagcaagatcctgtctcaaaaaataaataaaaaattaataaacaaaaaatgcatacaatgtatagatacacaaagtgtatatatatacatatatatgtatacacattcacatatacacacatgctgtgttcacaatcacctagatgacatatgtatgtgtatacatacttacacatatacccttacatgtacacgatatatctctacccatacactaccatgtacacatgtccatttgtacacagctgtatatgtacacacacaattttgcacacacctgtatatgtatacaatgtatggatccccatatccacattacacacaatgtgtacgcatctacctgtgtacacacacccacctatgaacacaatgtagacacatctgtataaacacacttgagatacatgcctgtgcacataggcaagtatgtgccaagtatttacacacctgaagtagaagcacacacacacccacactatgcctgcacaccaccgcatggccacgttcaccagcgccccgggcctccatctcccagctaacgtgtcccgttttcctcccctgacagccatgctggtcgttcagatgcctttctcctttcccatggcccacttcatcctctttgtctttacggtttccactatatttcacgttcagcagcggctagcgaagattcaagccatgtgggagttaccggtgcagataccagtgctagcctcaacatcaaaggcactgggacccagccagctcagggggatgtggacgatcaatgcaataggccgcctggggaaccagatgggcgagtacgccacactgtacgccctggccaagatgaacgggcggcccgccttcatcccggcccagatgcacagcaccctggcccccatcttcagaatcaccctgccggtgctgcacagcgccacggccagcaggatcccctggcagaactaccacctgaacgactggatggaggaggaataccgccacatcccgggggagtacgtccgcttcaccggctacccctgctcctggaccttctaccaccacctccgccaggagatcctccaggagttcaccctgcacgaccacgtgcgggaggaggcccagaagttcctgcggggcctgcaggtgaacgggagccggccgggcacctttgtaggggtccatgttcgccgaggggactatgtccatgtcatgccaaaagtgtggaagggggtggtggccgaccggcgatacctacagcaggccctggactggttccgagctcgctacagctccctcatcttcgtggtcaccagtaatggcatggcctggtgtcgggagaacattgacacctcccacggtgatgtggtgtttgctggcgatggcattgagggctcacctgccaaagattttgctctactcacacagtgtaaccacaccatcatgaccattgggacgttcgggatctgggccgcatacctcacgggcggagacaccatctacctggccaattacaccctccccgactcccctttcctcaaaatctttaagccagaggcagccttcctgccggagtggacagggattgccgcagacctgtcccccttactcaagcactaatgctggcccattctttgagaccttttctccttctctgcctccctcaagatgagtgcccgggcatgagaagcacatggttccatgagcaggacccatctctcttctgtgaagatgcgttgggctgcaagtaacagaaatctcagtgaacagtggcctggcgtggtggctcatgcctgtaatgctcgcactttgtgaggccagggtgggtggatcacttgaggtcaggagttcaagactagcctggccaacatggtgaaaccccatctcgactaaaaatacaaaaattagccaggcgtggtggtgcacacctgtaatcccagctactcgggaggctgaggcaagagaatcacttgaacccaggaggcggaggttgcagtgagccaagatggtgccgctgcactccagtctgggtgacacagcaagactccatctcaaaaaaaaaaaaaaaaaaaagaaaagaaaaagaaatgaatgggttcaaagaccataatcatgcatatcacataagaccagaagtggcccaggtccagggtcagttaatttagcggctccacaaagtcatcagtcacctgagctccatccatcttcacatgctgtgctaccatttcttagctgtatcatcccatggtcccaaaagggctgctacacatccagccatcacatgcagataattcctttcaaaaacagcagaaagaggctcgttcttgtcttggtcccttttgaagaatgaatgaaaccttcctaagccttccagcaatttccccccaactccgatgggtaggaattgtcacatacccatgtgacccgataggaggcaaaagaaatgagacttctgggattagtttagcctcagattctgcagctgagaagttgatcagccacctctgaaggacatgcagcttgcagaaaattagggtggtgttaccaaggtgaaaaggggaaatggctttagagtagacaacagagatgccctgaggggttgtgtaggttgttcactgcaggaagtcccctggttaagaaggcaagtggggtttaaacagacccacagtctactcatcaaaccaggtgtccttggcattgtgtccacccagagagctcactgttttcttttctttttcttttctttttttttttttttttgagatggagtcttgctgcatcccccaggctggagtgcagtggcatgatcttggctcactgcagcctccgcctcccaggttcaagcgattctcctgcctcagcctcccgagtagctaggattacaggtgcgtgccaccacgcccagctaatttttatatgtttagtggaaatggagttt[131 bp omitted]tctggaagtggagcctttttccagtttgcacaaatgtgccatattggcttgtagctggcatgcatccaagtccataggtcctgcctcttcaatcctggctttctagggcctgggatgatcattgctagaactgagagaccagcctggctcagtgaacttcagggcgttccgttcattctttcagtaaatgtttgcagcacatgtgttacatgtcaggcagtgaaaccccccacagcagccttccctctcagaggatacatttgtaaccattacacagtcatcaaaggaataattttttttaatcaccagtgtgcatacagtcatggagttgggtattcccagctaccagggaggctgaggtgggaggattgcttgatgccaggagttagggaatatagtgcaccgtgattggacttgcgaatagccactgcactgcggcctggacgacgtagtgataccctgactcttataaataaataaatgaataaacacaattatgactttgcggatgggagaaaaggttctctgagagcgtattacataagtatcacatgaactccaaaatacatcttaggccaggcatggtggctgtaatcccagcactttgggagggtaaggcgggcggatcacctgaggtcaggagttcgagactagcctgggcaacatagtgaaaccctgtctctactaaacatacaaaacattagccaggggtggtggtgcagacctgtagtcccagctacttggcaggcttaagcaggagaatcgtttgcaccagggaggcagaggttgcagtgagccaggatcacaccattgcactctagcctggacaacagagtgagactccatctcaaaaaaaaaaaaaaaattcttaagagtagatggaatcctattacaagtctggatcaaaaaggcagctttggctgggtgcagtggctcacacctgtaatcccagcactttgggaagctgaggcagatggatcacttgaggttaggagttcaagaccagcctggccaacatagtgaaaccctgtctctactaaaaatacaaaattagctaggcgtggtggtgcatgcctgtaatcccagctgctagggaggctgagacagaagaatcgcttgaacctgggagatggaggttgcagtgagctgagatcacaccattgcactgcagcctgggcaacaagagcgaaacttggtcaaaaaaaagaacaaggcaacttttacaacgattttttagatctcaatattacagtattttctccagactacccacaaatacatactgtgcacctatcatgtatcagaaagcaatctaggagatacgatccctgctctcaagacggcattaacaaatcacttcaaaatataattggtacaggccaggtgcagtggctcacgcctgtaatcccaacactttgggaggccaaggtggcagggtcacttgagagcaagagttcaagaccagcttgggcaacatagggagatcctgtctctacaaaaaataaaaaactaactgggtatagtggaatacaactgtaggaccagctactcggaaggctgaagtgggaggatcaattgagcccaggagtttggggcttcagtgagccacaatcacacctgtgcatagccactgcattccaaagtcgcaacatagcaaga[143 bp omitted]aaccctgcctctactaaaaatacaaaaattagctgctgtggtggcacgcacctgtagtcccagctactcgggaggctgaggcaggagaactgcttgaatccgggaggtggaggttgcagtgagccgagattgtgccactgcactccagcctgccagtagcgcgagactccgtctaaaaaaaaaaaagataattgaaaagatacaattagatcctgaggcaagcaggtgctatggctcacatctgtaatcccagcactttgggaggccaaggtgggtggatcacttcagatcaggagtttgagaccagcctggctgacatggtgaaactctgtctgtgctaaaaatacaaaaattagccaggcgtggtggtgcacacctgtaatcccagctactcgggaggctgagtcagtagaatcacttgaacccaggaggtgaagtttgcaatgaactgacatatcgccactgtactccagcctgggcaaaagagcgaaactcaagagagagagagagagaaaagagagaaagaaaagagaaagaaagaaaagaaagaaacaaagaaggaaggaaggaaagaaagaaagaaagacaaagaaagaaaggaaagaaagaaagaaagaaagaaagaaagaaagaaagaaagaaagaaagaaaagaaagaaagaaaggaagaaagaaagaaaaaagaaagaaagaaggggaggggaggggaaggaggccaggtgtggtgactcacgcctgtaatcccagcactgtgggaggccaagaccagtggattacctaaggttgggagttcaagaccagcctgaccaacgtggagaaaccctgtctctactaaaaatacaaaattagccaagtgtagtggcgcatgcctgtaatcccagctactcaggaggctgaggcaggagaatcgcttgaacccaggaggcagaggttgcggtgagccgagatcatgccattgcactccagcctgggcaacaagagtgaactccatcaaaaaaaaaaaaaaaaaaaaaagaagaagaaggaaagaaggaaaaagagaggaaggaggaggagaaatattttttccagtctacacaatgaacatgactatatccttttggggagggagtacgtttataatataaattagtaatttttggtattttgatgttggtggtctttttcaggcctcatgatgtaaatatccaccttctgttgagatcagaggaaagaaggaaggtgctgcttggggttccccatctgatcccccttggtccagccctggttttcctgaggcaggagggagggatgaagtctttggagaagagttgggtgttgggcgctcggcagtgccggcagtgcaggaggcaagcctttcagttaggctgaaggttcagacaggcaccccaccaagccggcttcctggccctgactccttggggcagtgcagggaccacgtgcaccctcagctcaacagagcccactctggatgcaggcgagatgcggaaggtgcaatggaggcaggtggggggcctggcagaagctgaaagacgagtgcccgagacacagagagatgagcgcagagactgacagggatgacggatgcagcagggataaagggcaggagggagttggagacagagatagggaggagagaacagccagagggcaaatcagacagagaacagagaagagatatgaagacagaaccaggacagagtgacctgagtcaggcagagatggggacacattgatatggagagtgatacagtcagaaaagtctctgggccaggtgtggtggctcacgcctgtaatccctgcactttgggaggctgaggtgggaggagcacttggggtcaggagttcaagaccagcctgagcaacatagtgaaaccctgtctctataaaaaaatgcagaaatggctgggcatggtggtgcacacctgtaatcccagtactttgggaggctgagactggagtgcagcggcgtgatgtcggctgaccacaacctccgcctcccggattcaagtgattctcctgcctcagcctcccgagtagctgggattacaggcatgcaccaccacacccggctaattttgtatttttagtagaggcggggt[136 bp omitted]acagtgctggtggcgcacccaggtgccttcagattcctcttgccagttctgtgcacccagcccccagcttgtgtgcttggtgtattaatcatgcctttgtattttctgaacttctgctgctttgacaagtgcgggcctcgatgactctggagggactgaccctcccagggatagccaaatgctagagatagttaactactcacctttcctatgtaaaccagccaatccagagcccacaccccatccacacctttatgagcacaggctccctgagccaggcaccaaaaactcaggacagcctctatgctccagagcctgctgaaattcaaactaggtaatctcaaacccacttaccttgcctcttctggtcttttttgttttgttttgtttatttttattattatttctttgagacagagtctcactctttcgcccaggctggagtgcagtggcgtgatctcggctcactgcaagctccacctcctgggttcaggccattctcctgcctcagcctccccagtagctgggactacaggcgcccaccactgcgcctggctaattttttgtatttttagtagaaacggggtttcaccgtggtcttgatctccggacctcgtgatccacctgcctcggactcccaaagtgctgggactacttttgtttttttaagatggagtctcactgtgttgcccaggctggagtgcaggcatgatctcatctcactgcaagtgattctcctgcctcagcctcccgagtagctggaactacaggtgtgcaccaccacacctggctaattattttttttttttgtatttttagtaga[131 bp omitted]ttttttgaaacacaggatcttgatctgttgcccaggctggagtgcactggtgcaatcatagctcactgcaacctcaaacttcaaagctcaagtgatcctcctgcctcagcctccagagtagctgggactacaggtatgaaccacggtgtttggccctgaaacctattttttttttttttttttgagatggagtctcactctgtcacccaggctggagtgcagtggcgcgatcttggctcactgcaacctccacctcccagattcaagcaattctcctgcctcagcctcctgagtagctgggattaaaggcgcatgcccagctaatttttgtatttttactgg[133 bp omitted]ttttgctgctaacaacttaccctatgacgttcttcccaggactgcccttgggctggaggttcctgggagtttatgtcattcctccctccctctgtgacccatggctcatggctgactaggggtggtatagtggcaagtctccagatgtagcccctagtgagcatgtccctgatattcacagatttgtatagtgccctcccgtatttaacgtgggcttgcctgacttgcattaattataaaatacagtggaagagaaattgtgccagtttcaagcctagtctttaagagactggtagcttctgctcctggctcttggaatactcactcttgggagccctgagctatcatgcaagaaatctagttatcccgggggagaggccacagaggaatagtgctgacactgcatggagtgtcacactgcacaacccagctgggcccagccttcatgctatccccaccacggtgccacacacatctgatgtgccatcttgtatgtgctagcccaggtgggccctgagatgactgcagctctagccaacatcacatggaactgaagaactgccctgctgagcccagtcaacccatgcatttgtgagcagtcatagatagttattgttttacaactctaagttttggggtggtgtgggtttttgttgtttgtttgtttgtttgtttgtttgttttgagatggagtagcactctgttgcccaggctggagtgaagtggcatgatctcagctcactgcagcctccacctcctggtttcaagtgattctcctgcctcggtctctcacgtagctgggattacaggctcccaccaccatacctggctagttttttttttttttttttttttttgagacggagtctcgctctgttgcccaggctggagtgtggtggcacaatctcagatcactgcaagctccgcctcccgggttcacgccattctcctgcctcagcctcccgagtagctgggactacaggcacatgccaccatgcccagct[138 bp omitted]cccggcccagtttttatgtatttttagtagagatgggtttcaccatgttggccaggctggtcttgaattcttggcctcaagtgatctgcctgcctcagcttcccaaagtgctgggattacaggcgtttgccactgagcctggtttgttgtttggctataataagctcaaacagggagatacaaaggcccagttccatgtgtcccaagacaggaaagactccacaacttaatttgtgctctggagctccctgcaggattaggctgaggttggaacttcacctgaagtcacctcttgctcctcttcccctttgctgtcctgttttccccactcttctgctggtttctcctgggaacatttctttctttttctctctctctttttttttttttaagatggagtttagctcctgttgcccaggctggagtgcaatggagcgatcttagctcaccacaacctccgcctcccgggttcaagcgattctcctgcctcaacctcccaagtagctgggattccaggcatgtgccaccatgcccagctaatttttttttgtgtgtgtgtgtttggtagagacagggtttcaccatgttggccaggctggtctcgaactcctgacctcaggtgatccacttgcctcagcctcccaaagtgctgggatcgcaggcgtgagccaccgcacccagccagaacacttctttaataaatgactggcatttatatcttgtctcaggctctgcttccaagagaagctgatcttagacctgatgcttctaattttttcatctccaaccagaacccagggaggtcagggtccggctcccccattctccctctccactctttcttgctcctctcctgcatccaaaaggcataaccaccttccaggctccccaaacaacagggagccatctaccggggtcgggggcatgtaagaacatccatgaggtctctgaaggaagcagcaagcagcttgtttgccgtggccagcagcaaaagaagccccccaaccataccacgccggagggggatcataaggaggccaggtaggcaaagttaaggcagttgcatgtcagcagcacttcaggaggcaggtggggttggaggttgtctccgatcctgtgtctgcggtaggaggggctctgctggtagttccctctcctcccacaaggagcttctctccacccccatcagttctctgtctctgtaaatcctagaatccatcaccatggatcctccagcaggtcccacagccggctgctgctggagtcagataagtcagcggagaagatgctggggggtgggggaccagaacccagaggaggacccccgctcagggcctccagccagtccagggagtccgtggggtccctgggagaaggggaggaggagttcgtgggagacgggagtgaagaggagaaaacagatgagaggccttcagagtccggggagggggacagcacgtcgaaggagccagggaagtccaggggaatagggggcagggggtctgcgggataaagaatggtacatgagcttggaaagtcaggggtccgggcgccagccccccataccccatttccaggatccagctccccagctcacgcctcccttggacgcaggagtccagaacctcagcccccacctcccctaaatctagcagtttggatcctaccatcaggctccacctgatcctccaggatgtcatcgatgccccggttaggaagcaactgcggatggagaaatttggcgtgaactcgggactgcgacctggacctgactggagaaccctagccggattcaacccacaccctcttacctgcgccctccggatcgcttcctgcagctcctcctccagagtcagagccgctgagcccggccctgaggaaggggtcagggctggagctgcagcaggagccggagtgggagttggagccggagccgtccccggggtatccgcggcacgtggaagaggtggcctgtgagatgctgcgctgggcttgacctagagcagccaagagggcgagcgcccataagccatgcccacagggcgcaaccccacccactcgcaacgtgtggctccaccccttgatcctctcgcgacccctcgctcatcaacccctttggcctcgccccctattctttcattggctcctcttctctaaagatccgccccctgttagtctgaaccacgtcccctcgccttcaaggcttcctaccgctggtcctcgcccccacacttcattggctagttttttcgacaccccgccccggcccactttgctttctcttcattggtccgcaagctcatagccccgccctcaccgagccctgacgccgggcggctgccagggccttgggcttgaggcgcggccagggagcacccgcgggactgtcctcgcgccgcggcttcggccgctcgcggggcggcgcgccgccgcgcatgcgctccaggagcatagacttggtccccgacactgggaggccccgcaggcgcagctgctgccggagctctgagacctggggaggggcggggcgtgggaagaggcagtgctgggcgggctcccgggcgcaggcaggagctggacaggatatttggaaaccgagaaaggaggcactgggggtccggactcctgggaccctaaaacaggatgggactgggtacccgatctcctggatttccagagggcagaggctgcggggttggaattctgggaccccaccgaaggagagagaaggcctggaaagttacaccccaaactcaccgtcagctcctccagtttaagggtctgaagttccaacttgtgtggggggggcgaggggctagggactcctggtgggcagggagtgaggggagagggcttcatcctggtgataatcgtgaggggcgaacaaaggttagagaggtagagggggaaaaggcgttctggggtcctcaaagacggggagctggggaagatgcagaaaagtgagggtccagaattctgggtctccaagggcgcaaacatggggctagatttctgtgcatgggggaggaggaactaggcgttcagactcgggtctgaagggcgaagggaggggctgggatcctggactcttaaaccctgggagaagagagggttgggggccccaatcccctaatcttggactcgaggtttgagggaggaggatgctgggacctgaatttctgggtcccgggagaacagaagtgggtgtcatacctaggatgtggctgctgcgagtctgtcccttcccacagagatggcccaggaggacccagggcggacccctcggcttgggggtccgccctggatccctgtctcggctctgggggcatgtactggtggtatgtcaagttccccctgggcttggactccctccaacgttgggagatcttgggagactcctgaaagagcaggtgtgatgttttaggcttcagcgcggctcccaccttccggccccaggactacatgcaaagtatggggtcagctcggtgccaccgaagaggagcaaaaatggcagcagcaacaagggagacaaagactaggctctcagagggacctctccctccagtcgagactcaccttctttggggacctccaaggaggacaatattctggctcggggagcaggaccccagggctgaagaggaaaggggccgtgcccgagggcaaggccggggccagaggagggtctgaggctgagatccacgggtccggatccgagactggagagacggtgaaggaccctgagaggcctgcaggcagcaagccaggccgggaggagcaaggctgtgtggaaagcggggctccagggtgccggagggcaggccagggagcaagacttgattgctgggagatgggcgcctgaactggatctgagggcggaggtgtgggggggctccggttgctacattctcaagtaaagcaggaattttctatcacaaaggggtgtggtagctgaggatcacagatgtctgaggttttgctaggacaggggtggggcctgcactcctggttcttggggagagggagaggctgaaagctacatccaggccggccgcggtggctcacgcctgtaatcccagcagtttgggagactgaggcgggcggatcacttgaggtcaggagttcaagaccagcccggccaacatggtgaaactccgtctctactaacaatacaaaaattagccaggcgtggtggcacgtgcctgtaatctcagctactcaggaggctgaggcaggagaatcgcttgaacctgggaggtagaggtttcagtgagcttagattgagccatgacactccagcctggcgacagagcaagattccatctcaaaaaaaaaaaaaaaaaaaaaagctatatccagagcttctcatgtataccaaatgtggagaccaggatgcctgtcttctccaaagaagcaggatccaagttcaagcatctcattagggtggagaagcaggaagcagagctcctaggggtggggtggccagagacctggaccctggatccttgggaaaggacaggatgggattttggtctgtcccaggggatggagactgagctgcaggaaccaatgaggggtatctggcagctgtattccaggatatcccagtggggagtggggggtcaccatcccctcccttttggggcccatacttactctgctcctgattccgtctgtggatccgaagctggaggactgtggagggaggagggaggtgggaggaggaaggcgggaagggagtgtccaggagcctggcctggcaggctggtgggagctgcagttgttggcgggatatgcgtgcccagcccccttacacagcctgtgcaggcgggtgggcgggcagcaggctcccttcctcgggcctcccgcctgctccctgccagcgcagcgccgcgggccagcgccattctggggctacgagccagccagcgtgcaggctggaggcagccctgcccccggctccacctgccccctccatgagcaagcgtgtgcccaccccaccccctgcgcaatcgctatcttggcagcctggcccctttgcacctcgcctccctttatccatgcactcctgctactttctgtgctatctcggggccttcccacagtcaacactctccgcatatccacattttcagtatgcatctctctgggctctagttttgcacacatgccatttttacgcacttgcatgtttttgcagactcttcatccttgactcactctgcctcagcatccatgttaacactgtttttttttcctttttttaatttgttttatttttttagagacaaggtctcactctgtaacccaggctggagtgcaggggtgtgatcatagctcactgcagccttgaactcctgggctcaatccatcctcccacctaagtctcctgagtacctgggactacctaaatttttttgttttgttttttaattttttgtagagacagggtcttgctgtgttgcccaggatgaatgttaactatcttttttttttttttttttgagacaaagtctcgctctgtcacccaggcttgaggacaatgtcacaatctcagctcactgcaacctctgcctcccaggttcaagcgattctcctgccttaacctcccaagtagctgggattacaggtgctcaccaccacacccggctaattattattattattattttttgagacagagtatcgctctgtcacccaggctggagtgcagtggtgcgatctcagctcactgcaacctccacctcccgggtgcaagcaattctcctgcctcagcctccccagtagctgggactagaggtgcacgccgccacacccggctaattttctgtattttagtagagatggggtttcaccgtgttgcccaggctggtctcgaactcctgagctcaggcaatccgcccgccttggcctcccaaagtgctaggactacaggcatcagccaccttgcccggcgtcatttttttgtatttttagtagagacatggtttcgccatgttggccaggctggtcttgaactcctgacctcaggtgatccacctgccttggcctcccaaagtgctgggattacaggtaagagccaccgcgccccacctggatgaatgttcactttcttatgtgcacagtcagggtttgtcccccaatttgggagcaaggatctctctgcacatttctgcttttctctggacatatgcgcctttttgtatactccttgctctttgattgctggtgtctttgtacccatccaaccacataggcacgctcacgtgcacactcaagtaccctttgccttctcaggaactgatctgtagttcgaaacacttgcacacttcttttttttttttttttttttttttgagatggagtttcgctcttgttgcccaggctggagtgcaatggcgtgatctcggctcaccgcaacctcctcctcccgggttcaagcgattctcccgcctcaacctcccaagtagctgggattacaggcatgcgccaccacacccggctatacttgcagactttttgcctgccctgggacctaaaacaagacctttgacactttcacagcttgacagctcattgtcccctcacccaaactcccacactggtcctctgaggtccctcctctgctcttctgcccctgcgtgtgcgccagtataagcctttgtttctcttcagtgcttgagccctctgcacgcctacccctggcctccaatccccattgctccccccgtgagcatgctactagccatttgcacactcgttgatccaccacagccggacccctgtgcttgggcctcctttatgcaacatgaccttttgcacaaaaaacacaggcctcatgggacctaccacccctcccttcccaccccagagtacagcattctcaggatcccatcccccacgcataaagagagccctctctcaccagatcggaacttggagcgaatgatttgggaacgctgggaggaagccgccagggtcattgccaaggccgggatggggacctggacggagagggggcagggcaggggccccatagagggctggctcagagtggaggtcaggaggccgcccctgagagtgaattcagcagggaaagggcccgaaggaggtgggaataggagcagccttgggccataacttccggatcccaggggctgtagaggagggggctgcacacccggacaccttgctccgaggaaggaggaagctggggacccagacacctggtctgaaagacagggctgagggtctcaaccctgggatcctgggaggggagggacctggaatctgggactcctgggtcctgaggaggaagggttgcgggttgggacccctgtgtctaggaaagggaggaagcagaggggcctggagtctggaatcttgaaggagaaggaggttaagggctggaactcaatactcttaggagatgagaatccaagatcctgggtggagaggggaacggggccctgacaggtttctgaggaatagaagggcccctgtgacctgcatctgagaaggagtgagtagggtgtcagccaccaggttctctggggaagggactgggaccagagaggggatagaaccgttgaggagtgcgccccccccgtccaccccaggggcttctcaccaggtgggctcggcgaagctgtgctctggggcgggttgagtctagaggccgaggctggacaccacaggctccgccccaccagcctgggaccgcctccaacccaccttcctggggtgtgacgggagccccgccggggaccctgagaaggggtgggagcacccgctgggagggcctgtgcgggccttgggggatgctggggggtgagagcggggacgtcagggttccccggctcgctcctcctgcacgtcctggggttgtggggtcggggggaacggtggcaggcggactgacagaagcaggtgcccggagaggggcgccgggtgagcagcagcggcaggtggtcgtgtcctggccctaccggcaggtgccacctgtcgcctactttttccctgacgcagcaactggagtcaagttcaggggagtgaaaagttcaaacggggggcccagattcctggatccaagaaaggagagggatggggacctggagtcctgggtttaaagaaaaagaggcaggggcctctggggtgttgggaacagggacagaggtgttcggattcggcggtgtgcccggcaggcagaaaggtccagagggggctggggacttagattcctgggtctgagggaggagggggctggagtatggatttgggggggtgtcgaagggagaatcgctggttcccactggcaggactgagggccttataatcggcagagcaagcttagggccgtgttctgaggggtgtgggaggctcctctgctcttgggttggattacatgcaaaagggcgagccaaggccgtggctataaatacctcctcagactcggcaggggcccagacaagggccctgcaaccttgttctgcagaaaatcatcattagcgcccctgagtcttaacaatcgaggcgctgccgataccacggatacctttattgctccctggcattcacatcctaagcccatgctcccaccgtcccatccgctacttcccgaaaactcaatctcccaacattccacgcgggataagaactacaactcccagaaagctttgcgctcaggcgggctcctgtccgtagaagcccgtgacatttcaaggttcgcgcgctcgtttggtattggttctcaaggagacgtggccacgggaggcccatggcgataattggctggcagctcctgctgctcaagatcccagaggaggcggcggagcctacggagttcacggtgcaaggcatcgtccgtcactggaccagtgaggcgcaggcgcgagctccccagggggaggatgaggggcgggtgcgaggagaagctttcgaagatgtcccctgtgaggccgaaggcggcgcggttagagtctgaaagtgggagtgaggtagttgcatcgggaagagccgaggctgcgtcacacccaaaggaagaaaaaaactacaaaccccagcaactcctggggcggggtccgttcacacgctactctaggagcccctgggcatgatggaagttgtagttcagacgatggaaggccaccgttgcctgggaaacggcttcccaaatccccgagaaagggctgggaacttgccttacagattcctaaaggtggaggagtcaagttcaggggagtgaaagtcccgagacctggactcctaggggtggtgggtgggtggctggtggagggaatggactagggatgcgaaccccagagaataaagggagctgggggcttgaactcctgtatcttgacgggggaaggggctgggtcctgcacttatgtcctggtggggagggacaggggtccagaatctggggttagaaggaga[140 bp omitted]ccccgtctctactaaagatacaaaaaattagccaggcgtggtggcgcatgcctgtaatcccagctactcgggaggctgaggcaggagaatcgcttgaacccgggaggcagaggttgcagtgagccaagatcgcgccattgcactccagcctgagtgacagggcgagactccgtctcaaaagaagaagaaagctgacagccccaatgctgtatcccattgctcctcacctgtgtccacagcctcccgctctgcagggggagggtcccacgcggctggcggcccgcggccagggcccagctgatagtggctgagcagatggtgcagctgggcgggggtcaaggtggggtggtcggttcttaggctgctccatgaagcctggtgggaagaccaggtgagaggttgatggtcattacggggcagttaagaaatgaaatggaagggcttccataaggggagtgggtgtggtgggaagataatggcatctctgcagtgtcttctgggcactgtgaagtctgtttatcaccaaagtgatggtggggaagggtgtgctcccagcaatttgtaaaaatgtgatgtgcctcaggataattgaggatacaggaaatgagtagggtggaaataaataagattggccattcgtttatattattgaatctggcgatggtacttggggattttttttttttttttttttttttgtccttaaagagacagggtctcactccgtcgcccaggctggagtgcagtggctcgatcgtggcttgctgcagcctcaaactcccggctcaagtgatcctgggctcaagtgatccttggccccagcctccagagtagctgggactacaggcacacgccaccacacctggttaagtttttgtagagatgggatctcactatgctgcccaggctggtctcaagcttctcaaagttctaggattacaggcatgagccactgcgcccagttgggattcattattctatggcggccactctatatctgtttgacaatgtctacacctgatgtagctgacgtcagaaccatcaatgtgcttaacatcagagactccacctagactgcctgagttcaaaaatcccaggtgggtcacttattaccttccggcaggtcaccgtcccctagtctcctcatccataaatttggagaacaggaactatctaatagagttggtatgaggatgcaatatggcaaaattgtaaagtacttggaacactgcctggggcttattaaatgcatggtaaactttctttcttattgttttgagacagggtcttgctttgtcacccatgctggagtacagtggcatgactgtggctcactgcagcctcaacctcctgggctcaagcagtccttccacctctgcttctggagtggctgggaccacagacgtgtgcctccacacctggctaatttttaaaatttttggtagagatggtgtctcccctatgttgccaactggtgtcaaactcctgggctcaagcggtccttccacctcggcctcccaaaatgctggcattacaggcattagccactacgcccagcccattataaacatttgatataaataaataaatgtctatggggaacagtttttg[143 bp omitted]gaaaccctgtctctaccaaaattacaaaaattagccgggtgtggtggcgcgtgcctgttatcccggctactcaggaggctgtggcaggagaatcgcttgaactcgggaggcggaggttggagtgagccgagatcatgccattgcactccagcctgggtgacagagtgagactccgtctcaaaaaaaaaaaaaaaaaaaggaaaaataagtgaaatcaagcgacctgtcctacctgattctgtttcctcatccaaaaaacagtcagtcacctacttcgatggggctttgtcagcattaaactagaagtgctaaacagggtgcctggcaggtagttcatgttcaatgaatgttttaatcatcatgttcctttgtctcataccacactttctgactcagcatgtctgagtgagggaccctggaaactttttttttttttttttttctggagacagggtctcgctctgtcgccccggctggagtgcaatggtgcaatcttggctcactgcagcttctgcctcccaggttccagcgattctcctccctcagcctccagagtaactgggattacaggcgtgcgccatcaagcctggctaatttttgtatttttagtagagacagcgtttcgccatgttggccaggctggtctcaaactcctggcctcaagtgatccacctacttaggcctcccaaagtgttgggattataggcgcgagccactgctcctggcctggaaactatttttaataagttccaccaggattcagacacagccgagtttagtcattgttggtgctggcttccttctacctgccaatgtgttacccacagtgtctgagctggggctggggatggcatggggttcaaggggagctctgacggtgagctgaatatagaaggtggctgaggggggttgaggagtcagaggtcaggggtcaggtatagctgaccaggagtcaccttgagcagggaagtgcggggcacacagagcaggttcacagccatggagagtttccggaagaactcagtggcaatgtcgcccagcccagctccctgtagccagtccaagacgaggtccaggttggttcggatttgaacagctcgggaccattgatagaaaggccggccttgacctgtgggtgttaaaggtatgagaggcagttggttggctggactctgtgctcctgcctcccagactcttcctatccttcagcctgggatctggagcttgttctccagggtacccaaaggtgaggcttgagcccgtggtgtgtctaatatgacctgagtctcagtggctcctgtctttgcctccctgacagctcccagccaaccttcacctcgttccatcagcgagttgagaagggatgcgttggagaagaagaacaagtagccaaaagtctgagacacgaggtcagggtgcagctcgcactggctggtcagctccaaggctgcctggaacacgcccagggtaggtctcaatcctggaggcatggcccccagctccgcgccaggccccggcagctctgcaccagctgtgaaagggttactatccaggagagcaggcagcgttgaatagagagtctgagaaaatagagaagtggaaacaagtgattggactacaactcccaggaagcttcagggtaatagagcatgaagatagtggggagctccaccaaagtcttctgggagttgtagtccattctacagtcaacacccaaagggtctccgtgagcaaatccctacttgatagaagggtatacaagtttctcgagtattttaagatcacctcttgtgcattgtgggacttgtagttctcagcagagacagctcaaggaggacaaaggatactggacaaagagttccctttcagtcaaagaattattcatcctgaattcccaaaggaaagaaaaagaatggagagtcaggaagtgggagtgggatggcagtttgccagtggaaaatgagatcaggccaaggacaggaaatgaggtcagaaacagaagaaataaacgcacacttggcaggaatgtacaggaagtgaaggaggaaagggcttcacaatccaggctgctagaggaacttagagactgatagttagctgtcccaaaagatcctctctcattcttgcacatagggcatcaagcccaccataagccagaaaccctgagaatgccaagaagtggtgttaaggtcaagggtaatgggggggaaactggggcagaaagcaggcccttccaggaagggcactcagagaaaaagatctgtcgttctgaaagggaagtgaattcagagctgtaggaagtgaggtcagcaagcgaaggaagtggggcctgatgaaagaggatcttcagtttaaatcacagttcctggcactatttgatctctagctatctatcaatcatttatctatctattatatatgaaacttaacagtgactgaagagtagacttagaaagtgggagattcagaaggtggtaatggtgatgttaccaagtagtgaggtcagcctgtcaaaagtggtgatgattacttttttttttatttcgtttaattttattttacttttttgagatggagtctgtctctgtcgccctggagtgcaatggtgcgatttcagctcactgcaacctccgcctcccgggttcaagcgattctcctccctcagcctcctgagtagctgggattgcaggcacgcgctaccatacccagctaatttttgtatttttagtagagacggggttttacc[137 bp omitted]cgggttggaatgcagtggcatgaagtaatcttggttcactgcaacatccgcctcccaggttcaagtgattcttgtgcctcagcctctccaatagctgggattataggcgcaggccaccatgcctggctaattttgtatttttagtagagatggggtttcaccatgttggccaggctgctctcaaactcctgacctcaagtgatccacccgccttgacctcccaaagtgccgggattacagatgtgagccaccgcgtttgcccaggtgatgattacaaaggaaaagaagccagaaaggcaggaagtgatgtaagctctaacaagtggtgtcagaacagcaaagtccttgggtgagatgggatgtcatgtcagagaaaagcagaaaatcttgagtcaaatagtgacatcagagccacacagtgtagttcaaacaagaagtgatgttaccacaaacaggaagtgatattacgtgaaacaggaagtgatgctatgtcaaacaggaagtaagaggcaagggccaaccttggtgaggtagtagacagactgctggaaggtacacatgatgacctcatccaggagggccatggcctcatcacataattccaagtcattgcagagctgtgggtctgaggacaggcttggggttaagagggagaaccagaagtcggcagccaggagcccaggtccccaggtgcagggcatgatgggagacttggacaagcctgagcctgagtcagagctcaccctcttggtcagcctccttctccatttccagcaccttctcctgcacaaagctaagcagctccgtggtgttggccatccacagcatgagtggccgcagctccacagacacagcttcaggagtcaggggcacctcggggaccccctcagggtggcttgaaaaagaggaaggaatttgtgatccctgcccaaccctcatcatagtttacaaaccccaagatctaagtctaagtgggagagcaagaccaactcccattgcgcagctggaaaagttgagcgcaaggagaagcagaaacttgcactggggcatgcatggggtgaacacagaactagacgcaaaacccaacccctgcatccctccagaccactctgctcagaatttctcttacttttctggctgacggtctccaatttccttaatcttttcctgtggaacagtaagatcagaatcaaggtgagggggatccactgaggggcttaagagttaataccctggtttttatagaagcacaactctcatagagactggtcctacttttcttagagatggggtcttactatgttgccaccggtggtctccaactcctgagctcaaatgatcctcccaccttggcctcccaaagaactaggattacaggcatgagccactgcaaccggccttcactcttcatacggattctttttttttttttttttttttgagatggagttaccctgttgttgcccaggctggggtgcaatggctcaattttggctcactgcaacctctgcctcccaggttcaagtgattctcctgcctcagcctcccaagtagctgggattacaggcatgtgctaccatgcccggctaattttttgcatttttagtagagacggggtttcaccatgttagccaggatggtctcgatctcccgacttcaggtgatctgcccgcctcggcctcccaaagtgccgggattacaggcatgagccaccacgcctggctcttgagacaaattctaatcccacaagctttagaatggtctctccttactttttaaaacatacacaccctatgattatgagtgatctagctccttcaggtcctcttctccaatttttacccccaagaaactccttaaacctctctggttaggccctagctcaataggatggaacgtttcccccactctgaatggtttctttctggaacttccatctgtaggtccagtggatttgtgcttcctcgcctccaagaatgaactcgctcactgctatccaagctccaagcccaatgggctgcggtgaattctcacactgatctctgtcaacttctcatccagtgggatctctcccccaccatctcccataatggtttcttcctaaggtgagttcgtgcttaggtgagctctcctaaggtgagtttgggcttccctctaagtgcagtggatctacatctcccagcattctatg[135 bp omitted]cccgtcttactaaaaatacaaaaaattagccgggcgtgctggcaggcgcctgcaatcccagctactcgggaggctgaggcagaagaatcatttgaaccccggaggtagaggttgcagtgaaccaagaccgccactgcactccagcctgggtaacagagcgagactccgtctcaaaaacaaaagcaaacaaacaaacaaacaaaacccaaaaccccaaatccttcccgaggcgtcatgggaacagtagtatccagcccagctatgaaaagggttgaaggtagggaagggaggctggagaagggacttggggcgctggtggggctggacggcgattggggggcgctcacccagacggcctccttgatgagccgggccaggcggcccagcagtcgtggcaggtggcccagctccagctcacgggcggaatgctgcacgcacagcgccagcagcgtggcgggcccgaggggcggcaggtctcccgagccggcggctgcggcgcgcacgatctcgcccagcagcgcctcctcctcgcgcggccggaagcgcaggactggctcacggccgtccaggtaggcggccagtgcctcgccgcgctcctgcaggccgcggccgcacaggcgacaggagaaggcccagccagggcctggcggcgtggccccggggcgcgcgggcagccacggcggcctcgcaggccccgagcccccagtgcgggggtccttgtacatgaacaggaagtgctcgcccagccccaggaggtcgcccgggtgcagctcagcctcccgcagcaggaggcacccgttgtgcgtgactggggcgccccgggacgggcgcaccatggccgggtgctcagggcccgcgcgcactgtgcagtgacgcggcaggatgtccggggcgttgaggaaggtgtccacatagggagccggggaccccccgcggccagacgagttcccacctcgcccaaacacgtgctgctctcgcgtcatcacatacaccacaaagtcctggaggggaaacgaggatgcactaaggacatcacttcaatccatatcttcagatctgttctctctgttttctacaacaacttttctattcccaccaactttttttttccttcttcttctttttttttttttttttttttttgagatggagtctcgctctgtcctccaggctggagtccagtggcacgatctcggctcactgcaacctctgcctcctgagttcaagcaattctcctgcctcagtctgttgagtagctgggagtacaggcgcctgccaccacacccggctaatttttgtatttttagtagggaaagggtttcaccatgttggccaggctggtcttaaactcctgatctcaggtgatccacctacctcggcctcccgaagtgctgggattacaggcgtgaactatcgcgcccggccccccaccgactttgaatagacactccaaggagatctggatctcaaaggactctctaagcacccgcaacgccactgagtggactcttcccaggcactttgtatggtggatggtcccataacacccatcccgaagaccggctatgtacaaggagacccccctttttttctttgagacagagtcacgctctgttgccaggctggagtgcagtggcacgatctcggctcactccaacctccgcctcccgggttcaagcgattcccctgcctcaacctcccgagtagttgagactacaggcgcgcaccatcacgcccagctaatttttgtatttttagtagggacagggtcaccatgttggccaggatggtctcgatctcttgaccttgtgatccgcctgccttggcctcctaaagtgctgggattacaggtgtgagccaccacacccagccagagacccatttcttaacatgggctctaccatttctttccctcaagcattagatgctttcaaggagatccctatttctaaaatgaactgtgcaactaccctcaccctcaaagaatggacctttccaaggaaatctccttttccccatccctggtcccacctgtccattatttcacccccaccccaccatggtaaaggcttccagatatatttccccttccaataatagtttttctcaatattcctcaagcaatgaatgggtacttttaaagagattcccttggactgggcatagtggctgacacctgcaatcccagcactttgggaggccgaggcaggtgaatcacctgaggtcaagagttcaagaccagacacggtgaaacctgtctctactaaaaatacaaaaattagccaggcatggtggcgcatgactgtagtcccagctacttgggaggctgaggcacaagaatcgcttgaacccaggaggcagaggttgcaatgagccaagatcaggctactgcactccagcctgggcaacagagtgagactcaaaaaaaagaggccgggcgcagtggagaccaaggccggcagatcacctgaggtagggagttcgagaccagcctgaccaacgtggagaaaccctctctctactaaaaatacaaaattagccaggtgaggtggctcatgcctataatcccagctactcgggaggctgaggcgggaaaatcgcttgaacctgggaggtggaggttgcaggagttaagtcctgcaatggactcacctattattcccacccccctaacagaggatttcaaagagataatcccccttccatcaatggatgttctcaatattcctacaatggactcctacaatggactcacctattactcccactcccccaacggaggatttcaaagagataaccccccttccatcaatggacgttctcaatattccaatccccaaaaaggacatctccaaaaagatctccatacagtgggctcttctggtcattccacggataaataaatgccttcacggacaacctcttaccatggagtgttccatctcatttatcaaatgaagacaggcattccagaagacctcgtcctaaaaaatggactctcatctccattccataaatgtagaaccactcaatctgacccccttccattcgccaaccatgtctgagacaacaggcatcttgatatgcatagatcccccttctacactaaattctaccattacccctaccccatgaatgggtgtttccaaaaagactcctacctccaaaagatttgctcatctacccttgtagaaaaatgggtctttccagtcttaccaccttctgaaggtagactctcctgttcttcattcctgtctgaaggaatgggatgacccaaaataaaagccccctttctacaatgggctctcctgctccctaacccaggaagggatgctttcttggcacctacagtgaactttcacttcacagccactccatgaatcggcaaaccaaatgaattcctacaatagattcacctggtattcctgcctccaaggaatgaacaattcaaatgaaaccttttttttttaatctcttttttttttttcttttttgagacagggtctctcactctgtcatcagactggagtgcagtggcattatcttggttcactgcagacttgcagactccacctcctgggctcaagtgatcctcctacctcagcctctcaagtagctagaatgacaggcatacaccaccacacctggctaatttttgtttctgtttttcttttttttttttttaagacggagtctctctctgttgcccaggctggagtgcagtggcgcgatctcggctcactacaagctccgcctcccaggttcccgccattctcctgccttagcctcttgagtagctgggactacacgtgcccgccaccacgcccagctaatttttatatttttagtagacatagggtttcaccgtgttagccaggatggtctcgatctcatgacctcgtgatccgcctgcctcagcctcccaaagtgctgagattacaggcatgagccaccgcgcccagcctgttttccgttttttatacagatgaggtctcactatgttgcccaggcttactttgaactgccacctggaagaatatgtccttccaatttgaccaccttcccaaaagagaccttcgtgttctccagccttgtccagaggaatggctgttataatatatgcaatcctcttactacagtgagctctccccatctccttgcccccacaaggaggaatgaattcttccatacaagctctttcctgaagagagtcttaccttctcacccatatacacagtcaagctgcctaacccaattggatctttctgtgaccgtaaaaatggaactgtcgaataagctacaccaccttctttttgtttttcattttttatagagacaaggttttgccattggtcccagctgtacttgtttagcttggctgtaccattgttaaccatcagttggccacaccataaggataattcacccgatcactgcacataaatgaatatttccaataacacattactcactctccctcctggagtgcagtggtgtgatcacagcttactgcagcctagacctccctgggctcaggggattctcctgcctcagcctcctgggtagctgagactacagataggtgccactacatctgggtaatttcttgtccttttttgtagagacaagatttcactgttgcccaggctggtcccaaacttctggtctcaagtgttactcctgctttggcttcccaaagtgctgggattacaggagtgagccactgtgcccagacaacatgttacatttctattagtgcagtaacttcccactgatcctcaaccaccaatcctttcttcctcttttgtaccaatcaagttctgttggtacccagctatgtaaaatagatagaaggatcaataccacctgcctccatcaatagtggtcaaatt[140 bp omitted]catggcgacaccctgtctctactaaaaatgcaaaatttagctgggcatcatggcaggcgcctataatcccagctactcaggaggccgaggcaggagaattgcttgaacctgggaggcagaggttgtagtgagccaagatcgcaccactgcagtccggctgggtgacagactgagaatccatctcaaaaaaaaaaaagtgtgggggggagggggcagtgcactcctacgaagaaaacacaggcttatccagaacgtgatcccaggcaacaaatgacttccctgccctagaaggtggactcccctgttactccctctcaagaaatagattcaagaaatagatatttccaaggggatctttcttttaaa[132 bp omitted]tcatctctactaaaaatacaaaaaaattagctgggcatggtggcgggcgcctgtagtcccagctactcgggaggctgaggcaggagaatggcgtgaacccaggagacagagcttgcagtgagccgagatcgcgccactggagtccagcctgggcgacagagagagactccgacaaaaaaaaaaaagtttattaaaaaaatttattttggagacagggcctttgtgtgtcacccaggctggtgatggtacagtggtgccatcatagctcacggaagcctcgacctcctgagctcaagagatcctcctgcctcagtctcccgagtagctgggaccacaggtgcacaccaccacgcccggcttttttttctttctttttttttttttttgagacagagtcttgctctgtctccctggctggagtgcaatggaacgatcttggctcaccgcaacctctgccttccgggttcaaacgattcccctgcctcagcctcctgagtagctgggattacaggcgtgcgccaccacacccggctaattttgtatttttagtacatacagggtttctccatgttggtcaggttggtcttgaactcccaacctcaggtgatccacccaccaaggcctcccaaagtgctgggataacaggcgtgagccactgcgccaggcctaatttttggtagagacaggatctcactatgttgtccaggctggtctcgaacttttggcctcaagcaattcttccaccttgacctcccaaagtgctgggattatgagagtcagccgcacgcctggcggggatcttctttctacaatggaatctccttaatgaagacagtgctttcctccaactttgaataaagtgaactattccctatttcctcctccattggactctttctcagccatctactctccctctcctgtgaatctctactctggaaccttgagggaccacgccccactagagtacttgaggctagcgcgccccgggccttctgggagttgtagttttgttgctcacccaccaacagatggggtatagggctctgggcgtgcggggctggggcggcggttacctgggcgtcctggtagccctggagcagcaggaagtaggggcggttgctgggggcctggatgaggcactgagtcaactgatcgaagtccccggggtctgcagttccgatttgggcgtcggctgcccctggggccatgctaagtgcctgctgtctccgctcctgctgccgccgccgccgcccctgaaggctaagctccgacacgctgcgccgcaaagacaagttttctgagcgctccttgcctccagacccagctggggcccctgatccggtccccgggccaggactggccagcgctgccccacccgacgccgcccgggagcggttcttctgtggccgccacgaaggggcgccggtgcctgcggagagatggagaacagtgaggctgagcctggaaagacagggatagacacagagctgcagattatgagacaaagaactggttgcagagaggtgaggctgcttcccacatttaggatttaggcttttgcatattctgttccctgtgcgtggaacacctttctgtcctgattaatacccatcttgcagttttcagctcaggaatttcattcattctt[136 bp omitted]tgcctcagcctcccaagtagctgggattacaggcgcgcaccacaacgcccggttaatttttgtatttttagtatagatgggttttcaccatgttggccaggctggtctcggactggtcggtctcgaactcctgaccttgtgatcctcccgtctcagcctcccaaagtgctgggattacaggcatgagccacagcgcccagcccatttgttcttttaacaagtatttaggccgggtgcggtggctcacgcgtgtaatcccagcactttgggaggct[134 bp omitted]tggcgtgaacccgggaggcggagcttgcagtgagccgagatcgtgccactgcactctagcctgggcgacagagcaagactccgtctcaaaaaacaaaacaaaacaaaacaagtatttattgactacctactacatgcttagaactgttcaagtcactggataacagagaagaccctgccctccaggagattgaaaccacctcttcctaaacacccttccctgacagtccaagttgaagcaggtgactgcaccactgggtactctgagctttttctggacccagctggaaccctggcacacagtaggcaccaaggggaaatgagctgaatgaatggactgatgtgtttcccactaggcttgtgagatatgggagggtggaaacctcatctgtcaacgtccccactgtattccccagtgccccgaaaactgtgtggccaggctgggcgcggtggctcacgcctgtaatcccagtactttgggaggctgaggtgggtggatcacttgaggtcaggaattcgagaccagcctgaccaacatggcgaaacccccatctctactcaaaatacaaaaaatcagccaggcgtggtagtgggcacctgtaatcccagctattcgggaggctgaggcaggagaattgcttgaaccgggaggtggaggtcgcagtgagccatgatcgtgccactgcactccagcctgggcaacagagcaagactccatctcgaacaacaacgacaacaacaacaaaaaaacaaaaaggaaaatgtgtggcctacaccaggtgctcaatggatactttgtcgagggggtggcggagacaatgcttataatcgtcattctttattaagcacctactctgtgccaagccctgtgctaggccctttatatacattgaatatattatcccattgaatcctcacctaggattttactgagattaactggcacagaatgggttggaattcaaaccccagttcaaagcccatcagttgaattgctacaacattctatctcccaaaaggaagctcagatacagaaaagcgtttagaaggctccctgagcagacccgtgctttcaatgcgccaggccccacccctgccaggcgcggtccaccaccagctgtttgaccattgactctaccttctgttccaggccttccttcgcctctacagtgatatcttccttcagccccttcctttcccatgtgatcccacttggcagccaacccagcctaaggccgtcttatccaaggccggcccctcagcggctccgcccatcttagtcccagcaggcctgatctaggaacctgtattcactcactctgcaggtgtcgcccccttctatactccacccacataggccctgctcagtagccacctcaacctacttggcagagctgcctcctaccacagagacccatgctcaccacatgccaccactcctcgcgggacccaacagtttttgccccagaccacgcttttccacaagccccgccccaccacaggccccgccccacaacatgccccgcccatctgctctgcatcgctcccaagaacattgtccgtgcttactcttccggctcctaggtctccaattcctttttctttttctggaggacagttttttgtttgtttgtttgtttgttttttcgagacgaagtctcgctctgtcccccaggctggagttcagtggcgcgatcttggctcactgcagcctctgcctcctgggttcaaattattctcatgtctcggcctcccgagtagctgggattacaggcatgcgtcaccacgctcggctaatttttgtatttttagaagagacaggatttcaccatgttggcc[131 bp omitted]cagtatcaaaacagttgcactattgatttctctttctcctaattggccccaagagaccacatcaaaggagagtacagtttaagccattaagctgcaggatgtacacctaacagacctcgcagaaaccttaccagaaagtggggattggttagagaaaggaactttcaaagatcagcaaattgctagtgtcctctaacctaccacacagggcgaatcccttaggcccctgcggactcctgcccattccactggactccacaaacgctcctcaggatctactactccgcagaccccgctacacaccccacctcctccaaggcagtctgaaatgcctgcagaaggccctaaccccaattcggagccacttcaggccactccaagccaccaccagcaaccagcccccgtcccgcctaagccccaagcttggcccctgtaaaactcctgctcaatcaacaagccccacccaactctcaggcccgcccatctggccgcccccggccctgctctagctctgcctagagtccaacacgcaccgtccagtcccctcccagtcccctcccgcgggccccgcccccagccagcccgcgagtcccacaagccccgcccaggccccgccccacggaccccgcctctctggcaccgagtccccgccccagagccccgcccgccgctcaccttcgctgtccgcggccccgaaggcctcctgctccaggcgccgcgcctcctcgcggccgcgcaactcgaagcgccgcgcccagccgggccgcgcccgccacagctcctgcaccagcagcgggcgctcggagtcgcccagcacgcgcaggtgctccgcccgccactcgccgcttcccacgcccgccgccgcgggccggcccagagcgtcgcacaaagcgaaggcgtccacgcagctgctctcgccggggccaccgccggggctgcctgctaggccgtagcgctctagcgcctcggccacgagctcgcgcgccgtggagcgcgccgtggccagcacgctcttgtagttggcgcccgatgccagtccggcgccgaagatcttgaggacccccggaggcgccgtggcgcgggtagccagcgggggctcgggggccacgcccgccgccagctccggcagcttcttctcgctggcccagcgctgcgcgccccccggggtcccagggcctcctgcgccgctggaccccgtggtcccggtccccgagccccggaagagctgggagatgcgcttggcgcggctaccggaggctcccccggccgccttgacagcgcccactcgccgcagctccacgtgcggcgggggcggaggtagcggctcgctgctgcggctccccgtgtccgacgaagaagacctgggagtccgccggggaacagagtcgcgggagagagacccaggacgacacgccaagacgggggtgggggcatattaggagggaagtgggcagagacccagagggaggacagggacccagggtggatggacggggcgggggtgagggtggggacagacgcgaggcaaagagagagagaaaaaataaataaataaaggcaagtcccacagtaggaaattccaagaggtgagcagggaggggaggaaggaaggtgaatcaatccccctgctccttctgtccccgtccccgtgcccatccggcctcactccacctcctagcctagctcttactcccaccgcgccctggtatcactgtgccccaccgtctccccctgcccaccagctcgtttgcccaattcaggatgaggaccggagccaacactttgcagggactgggcagtgaacagggacagatgggaagcaggtgtgcaggggcaggagtcctgcagagatggcactcacttgacagaggctgcgctgggccagcgccgccccagcttcgccagctgcttcctgggggaattgatccacaggcccacggggagatgaagcttcccgaagcgggggcttccgccctccttccgttcaccagacagcatggccctaagggaaggcgggtaaggccccaactcctaaggcattcttgtggggatggggtggagggaacctggactccgagtcagagggaggagggggctggggctcagacttgcgagtccagggggaggagagggatggtaccctggattcctgggtcctgggatggaagatggctgggggactgagtcttggggcccagggaggaggggtttgggctgctgggtccctggctcttaccctgcttcgggtccggcacacccggaggccctggctccactggcctgggtcagttccactgctcttgcctctgccacggctcccagcactgggtgggggacaggaaaaggcaagaggaaacccggcaggaagagcggggagggggcgtcctgtgaggagaccaggcctgggggaggagatctgggtagggttggccctgccccattccttgattctggaattacatcgcagtcagttggtcccctccaggacccaagggtcccggttttctgcccttcctccctcaggccggagcccatccccagacctctcctctcggggaaccaaaggctagaatcagtcccgtcccggggagtgagtcagatgcttagacaacaagataaatctttattgttgcctcgaatctgtggccttttcttttgggacctgggtttgctcggccgctccactgccaaggccaaacagtgaggatttgatgaaatcgatcaccttccttcgacgaaatatcctaggggtgggagtggggtgcagatcatggaaccggtttgggtactaattgtgtgggggacacccctcccaacctccccctttgtgaccttattctagcaattacctaagcctcgcccttcgaagtcctcctattcaagccccccgcactccatccccaggaaagtcctgctctcaggcctcagtagcccccagaccagcttctgtgttgggttcctggaagccccgccccttactccaagccaagcctgtcttcttcaatgggttgcttacgcaaaggtaaggccggttatcagtgctagggagccgcagatcagcagccccagaaggcggcttgccagcattttctcgggctgcagaggctggaggcttatggacgactccgtggtcgcctcccccggggttacgatatttggagaaggtttttcctccttgatcattttgggcaacactgttagagaaagcgtaaagagcagtcctggcagggcgtggagttcctgccctggcaaagacaagcccgtcccagtagccggccatcccagagataatcacgccttcaacagtgtcaagcctgaacacacccaagggaacccctgtcctcggggccagaggccacgcccccggcaggaagccacaccccgtgccccgaaaccacacccaacaggaagtcacgcccccatcgccaaggccacgcccccgccgcggaccccagctttcctgggccctgaatcctacacttctctcagccccacagcactgacctgtgacgtgaaaattgatgatcgtggctgggctggaattcacagagcccagctcgcagcggtagctgcctgcatcctctggacccaccatgggcttggtcagggtggcctctttccccttggacaccaaggtctccgtattgttcccccaaacctagacccaagctcaaggggtcactgaggcctgaggaattcaggggttgggggagtacaggggtgagaagatcacagggcctcagtgtgggaggtgagtgtccagggtgtcactggtcagggcacggggtccccagaggtctgtagagaccacacctaatagaccaccctcctgggtcatgagaatcgtgggtgcaggcccatagatccagaacacaagtattgtagtctagggagttcaagggttacagaagttgaggccctcaccctgtaaaagctgtaatcagtgaggccttccgaagcctgatgccagtttaactcacagtccaggatcatgtcttccatttgaggaacttccacattccgctctgggggtgggggatgaccatgggacactcatgattctgtttttgtttttgtttttgagatggagactcgctctgtcgcccaggctggaatgcattggcgcgatctcggctcactgcaacctccgcttcctgggttcaagcgattctcttgcctcagcctcctgagtatctgggactacaggcgcttgccaccacgcctggctaatttttgtatttttagtagagatggggtttcaccatattggacaggctggtctggaactcctgacctcaggtgatctgcctgcctcagcatcccaaagtgctgcgattacaggcatgaggcactgcgccgggcctccttcacggttctttaccctcccctaatcctttacatttgttgtaacctcgtcttttctcttttctttctctctctctttttttttttttttttttttagatgaagtctcactctgtcacccaggctggagtgcagtggcgcgatcttatctcactacaaccttcgcctcctgagttcaagcaattctctgcttcagcctcctgagtagctgggattacaggtgcccaccaccatgtctggctaatttttttgtatttttagtacaaaaacgatggtttcaccatcttggccaggctggtcttgaactcctgaccttgtgatccacctgcctcggcctcccaaagtgctgggactacaggcgtgagccagcgcgcccggcctcttttttttctttttagacaaggtctcactcttttgcctgggctggagtgcagtggtatgatcatagcttactgcagtctccaactcctgggtccaagcaatcctcctgcctcagccttccaagtagctgggactacaggaacgcaacaccacacctgactaatttttaaatttttttgtagagatagagtctcgctatgttgcccaggctggtctcaaactcctggcttcccaatcctcccgtctcagcctctcgaagtgcgagactataggtgtgaaccactgcacctggcctaaaccctaccttttcttgtctactgcccccacacccccatctaggctctctctagactgcctctcctctcgccccaccccacctgcaccaattcctcctgctgggtccagttctctcacccccgcaatcgtaggactttcgacaagcgtgaacctcctttttgcagttcttgcaccagatcagagtttgcaacatcacacctggaggggcagggtcaaggcttgtatttgcccactaaggggcatggctaaaaggagaggtcagggctaagggctggggccagatcatctatgacattcctagatggtcagacgaaggcacaggaccaggacgcaggtaagtagtaagtgggctcc[135 bp omitted]cccgtctctgctaaaaatacaaaaattagctgggtgtgatggcgggcacctgtaatcccagctactcagggggctgaggcaggagaatagtttgaacctgggaggtggaggttgcagtgagccgtgatcgtgccactgcactccagcctgggtgacagggtgagactgtctcaaaaaaaagagtgtaagtagaatatgacctgctccccaagaaatccatggtgcagaaagaatactggagacccaggaacctctccaaggcagagaatgacaaaaccaccaggatccaaaaaggcgagtggggaggttgactattcagagggcaggatgagggttaacttctgtaatccagactcaccacatttgttgggacaataagctgtgtcaaaagagaaaaaaagagagcaagaaagagatgacagagtcagatttctaaatgaaagacgatggaagagggggttgggggaagagctgggctttgggcttttgggttcgagggagaaaagacttgggtctgaaggaggaggcagttggggaagctgaggaactgggcttggagaagtaaggggctggagacaaggactcttggatagtggaaagaggagctgggggacaccgactcccatcttctctcaccctctttttggaatcgagcaacataggtggcaaaggtttccttttgcaagtgcaacatccaaaatagctccttcacgaagagatcgcctgggaagacacaggaacccccaatcccacgtgtgaggtgttggaagtttacttctgcctgcagagtctggcagtctacttcctggccttctcaggaaagggcgctacaactgaccgtctaacataatgccagctgctgggctaggcaatgcatattttgggggatgggggagggtcttaccctgccacccaggctggagtgtgtggtgtaatcgtggctcactgaagcctcaaactcctggactcaagcaatccccccgcctcaaccccccaagtagctaggactacaggcacacaccaccatgcccagctaatatgtatacatatgtctattttttgtagagacaaggtttcaccatgttggccaggctggtcttgaactactgagctcaagtaatctgcctgcctcagccttccaaagtgccaggattacaggcctgagctaccgtgcccggccagcaatacacatttaaactgaacaactgaggaagcattttagagccaagggagcttcaaagtcctttgctcaaggccgtacagctaggaagtggcagagcaggcattggaatctaggcggtctgggtccacagcctagtatctgaccaagagaccaggcatcactaacgctggcttctctgagagattcgggactcccacccccttgatgcatttaccttttacatcactgtctgtgatgcgtttcagatccttcagcaaactccaggaccccttttgcagtgtggcctcatctgtcagaggagatataaccccagattccagccttactgtctcattggcgcgcctaatcttagaaactacaatacccatgaggccactgggcaaagataggcctggttaaggactcagccgcccgttgccttctgggagttgtagttttattacataaaattgccagccgaggatagggaaaacggtatttactagcctcggggaacctcggaatctgcatctcagccttctccattcccgaatcccggagaccctgctgtcagcctcttccttcccctggtcttatctccctcctttcccaggacccaggggtccgtggtcccccctgccctcaccaacgacccccatataggcatcctcattaagcgacagttcctggaaatccttcacggcattctctaccctttccatcatggctttgtgatgcttcgcatccaggtggccaggcaggtaatctttctccagggactttagcgccagcacgacagacgggtcacatataacacacccctcggcaggaagcaagcaaccggccagcgccgcacacaggagggtaaaatgcggccccattgcagccggcgcgcacagttcccgaagaccgttaggaagggtgctctcaccccaaaccgagagcaggagaacgctaaacggagaaaagccaaaatccatcttaagaaatcccactgggccgcctatccatggggtccgcaaacctcgaaaagaggatcttcaggaaatctccaaataaagaggacctatgtccttcatcaaatgcctccgaagtgtgaaactgagccccaatccaggggacccaaaatttagggttctcactgaatcccccaactgagagatcagaaaaactattaaacaggaatcactcataagtccccaaactcagaacctggaatctcccaaccccatgcgccccttcccaaaatcccaaactgtggaattttccaagtccccagattgacgtgagcctgaactccaacccttaagagcaacaccgaggcactcccccgccagccccccaaaacctgttgaacctcaagctgaagattcaatgcccaaaccaataaacatctaacacagacccaaccacgatattatcaaactcggaactccttcaaaaccaaaacacataccagattcctagaactgaggaccccactaacacttaagcgagactccatgcggtcctctagacctagggggcccttgttcacccttccccaaaactaacgggctcccaatttgcagggcgcacccttccgcttagaaaaaggagccccgatgcatcctgaacagtgatgcaccctaaacagccgctccccgaccttggttcccgatttgtggcctctaacactagggttcattgaggagcccggtccaggttctgagggcttttaaagaggaagccggggtcatgaccacctacgctaattttcccaggggtaaaatcaaggattgtgttggggacgagggtaaggttggttgcgtgaaatcgagagcttttcgacggggtctgagtcacggacgatcccctctccacaaggaactcctgaaaccaccccctccgagcttctcacgtaggggcccgaattcctttatagatattccttggggttttcctcggccccacccagaaactcaactctgtctgattggactgcaacaaagggaggtcccgcccatcgctccatgacgtcacagaggctgcagcctttttggactagaattttcccagcatctagggaagaggaagcctcctgactactctggcttccagagtcaaggaccggactcaggccttcagtttcctcccctccccttgccccaggacccaggctttgggctagatccggccccccaggccgctgccgcccccaccgcggtccttggaaacggctgtcgagccacgaagtggacattttagccctaagactacaactcccaaaatgccctggggcctctttctctgtagctgactgacgctgccaacctcatagctttccgggaaatgtagttcagtgataatccgctccctcctccgcctcttctgcccacgcggaggtcccagtgggaggagaggactgggggccaatactgacagtccaggagtgagcaactgggggctcagacgttagggtcctggaaggtctctctctcctgtgtgatagaaacagggaaccagaaaaacagggaccacaactcacacaagtccagcaacaaggggctgtcagatctaagtagggacagtactcccaatcacgagtaataaaaatcctcagggcccggcgcggtggctcacgcttgtaattccagcgctttgggaggccg[134 bp omitted]gaggcaccagaatccgagaggtgggagtttgcagtgggccgagatcacactactgcactccagcctgggccacagagcaagactcgatctctgaaaaaaaataaattaattaaaaaaaaataaaagtcttcagaagtaccccaccttttcctccactctcttacacacacacacacacacacacacacacaaacccacacacacatacacagtggctctggctccaaaaaagctacagagacacgggttagtgctgtagacttttaattcatacctcctgctctctcacccgtggcagctgagttgggaacagtactgtaacaattgtaactgtaactccctgataagcctacaggcatggggtctggatgagtagacaggggatgtgatcagagctgactatgtttaaggtttcttctttcaccctccaaaaaacagcaaggggctcctgagatctcgacaaccccgtccaccttggccagacctcgtgctcctgcctggatctgaggctgggtccagggtctgcctacctttagatcgttttatctcagacctgcccaaagccagatgtagtggttctgggagttcagggacagacagtggttagcaatgagcacggtacctgccagtttgtcacaagcacagagggtgtgtttatacctgcacacttccagaaaacagatcccagaccctcagcagcccacctgcagacaaagaccaacttccttcattgtgagaggcaacctgaactcacacccaatatatggagctcttggcagtttatgagctttaaaaaaaagtgtccctggatccctggaaagttctgctccagaagctgtaccattttggcagtgatccctcaccccacgttcacattttagcctgtctgctcaaaacaaacaaaaaaaagtctttgaggggctgtggggcttgttggacagagtcccgctctgctcaccaactaccccagcttttccagagactgtgaacagagcaagacgctggccaactagagatggtttgttttccatctcaatttttccagcaatggtggaacattcattagatgctacaattaggttgcacattcattagattcttcacttggcccggtgtgctggctcacatctataaacccagcattctgggaggccaaggtgggaggactgcttgagcccaggagttgaagaacagcctgggcaatatcacaagacctcgtctctacaaaaattaaaaaaaattatccgggccaggc[176 bp omitted]gaggcagaatggcatgaacccgggaggcagagcttgcagtgagctgagatcgcgccactgcactctggcctgggctacagagcaagactccgtctcaataaataaataaataaataaataattaaaaaaaaaatatccgggctgggcacagtggctcatgccagtaatcccagcactttgggaggccaagacaggtggatgacaaggtcaggagatcgagaccatcctggccaacatggtgaaaccctgtctctactaaaaatacaaaaattagccaggcataatggcctgtgcctgtagtcccatctactcaggaggctgagacaggagaatcgcttgaacacaggaggcggaagttgcagtgagccaagatcacgccactgcactccagcctgggcaacagagcgagaccctgtctccaaaaaaaaaaaaaaaaaactaaaaagattcttcaccttagttatctggatttccagaaccccatcctgtccataagggccctgcagggttcttcacaggcatcaaacctggtcctctctagaacaagtctccctctagaatcactccagaaacacagaaggggacttggtgaatgcttgctctggagcaatcatatgctccttcagtctttggaggacccaggggagaagtaacccctcttctagagtagaccagagggagagttccccattcctgggggcagccatctggaagtactgtagatatgggctgggaagagcaggtgggcactgtggcttctagaactgcctgccagccatcaggaaaagatgttttgctagttctagaatattcagacagttccagaaacgtcccccttctctccaactctcccaactagaatcactctggatacgggcacccatttgcttcaggaacaccacaagcttctccagaagatgccaggcctctgaagccacgtactgctggctctagaaagatcaggctacttcagaaagtctccctggctctcaaggcttagccaatgtccagagtggagacaagtctgcattaatgcccacccactcgggcaggaaggccgcctccggcttaaagatcttcaggaactcagagtctggcagggtgaagttggccaggtagacagtgtctccgccagccaggtaggcagcccagaagccgaaggtgccaatggtcataatggtgtggttgcactgtgtgagcagggcaaagtctttccacggtgtagcctcctgtccatcgccagcaaacgtcacatcgccctgggaggtgtcgatgttttctttacaccactccatgccgttgctggtgaccacgaaaacgggggcttcgtgccgtgcccggaaccagtccatggcctgccggaggtaggcgctgtcgcccaccacacccttccagcgctgaggcataacctgcagatagtccccacggcgcacgtggacgccgacaaaggtgcgcgggcggtcccctgtgcggcccaggcggagctgacccagcacactctgcgcctcttcccgaaggtggtcgtgcagggtgaactctctgcggatctgttcccggagatggtggaagaaagtccaagagcaggggaagccagagagcttcaggaaaggatctctcaagtccgcgtactcctccgacatccagtcgtgaagctgcagctcccgccacggcgtgcggctgtccacttctggggccagcacgggcagggtgatgcggaataccggggccagggcggcatgcatggcaggcaggataaaggcccggcggccgttgagctgggccagagccagcagcgtggcatactgtcccatctgattaccaaaccggccattggggtagacagtccaggtgccggagagggaagcagggtgctggggacaggaagaggaggcgttggggcccatcgcagtacccggcaggcagaagatggccactgggggtgtcaccaggcggcggtctggacacaggatcgacaggcctaggccatgtggaaagctgtcttgatggatatggaggaagaagattacagagaggacacagactagcaggaaggccaggcagagctgacgatggctccggagccacatggctgcaggggaggaaaggcgaattagcaaatgctctgaggctgaggaggggaggctgaggagggatgtggggtaagggaggcgcctggggtgcagcactccttagtcccagggaaagaggaagttaaaggtttagactcctggggctgaggtagggagagcctgagtcctaggtttcagggatgagagccttggaatttcggggcatggggactggaagacaagtggttttcaagatagccatggtttggctgggcactgtggctcacacctgtaatcccagcatattgggaggctgagatgggaggatcccttgagcccaggagttcaagatcagcctgggcaacagagcactcttacaaaaaaattttaaaattagcttggcatgggccaggcgcggtggctcacacctgtaaccccagcactttgggaggccaaggtgggtggatcacctgaggttgggagttcgagaccagcctgaccaacgtggagaaaccctgtctctacttaaaatacaaaattagccgggcatggtggcgcatgcctgtaatcccagccactcgggaggctgaggcaggagaatcgcctgaacccggggggcgggagttgcggtgagctgagatcatgccattacactccagcctgggcaacaagagtgaaactccgtctccaaaaaaaaataaataaaattagcttggcatggtggcacatgtctgtggtctcagctacaccggatgctaaggcgggaggatccccggagctcacaatgagccgcgatagcaccgctgactgcactccagcttgcgcgacagagagggaccctgtcttaaaaaaaaaaaaaaaaaaaaaaaaagaaagtggtccaggttcctacacctttcctgaaggaatctcgagtctcccctcctgtaagttccgctgatactggactcttccaccagcctgtttctcaggagtacctgtctgtgaggcgcaaaatccaccacagaggtggtgatgggaaacgatagttcaagtaaaacaagagaggctggagggtcaggagcggaaggagcatcttggttcctggaggagtaatggctggggaggtggcggagattcctagggccttaggaagacctggagaagaggttgggggtgcacctcctggttctgaaggagttgttcctgggtcccaggaacaactgagtggggcagtccccacttacccgagctgcttgcaggtggcagatccacagtccgcttttcgtggccggagcgcaccctccgcaaaggcaggccacatccggccgcccctggaacgccaggcgtccggctatccggcccggcagccctcccctccgcgcagcctgtccggactggcagcgagggcttggggaggagaggaaggagagggcgcggccgggagtctcgcagcgtccgccctcccgggccgggcggatggctggaaggtggagccccgcccgtcacttggcgccgagccccagcgccaggggctaaggcgatggcccctgggcccaccgctccccagatcggggatgcaggggaccgcgccctgcccctccgccccgtcattgacctgcgcgaaggcttcacccagggcaggctacctggcttctgagcagccgcagcatcattgcgtggaccaggagacggagcgcccagttgcaatgctggagccgggaggtccaatccgccgccctctctcttccggtgccagggcttagagtcggcccccgacacctgggtgcttcgagcctggccacgccccagcggctgggcagggcccccgcacctggtcccggcgagtggagcgatcgtccgccctctgccgcgtcctcctgggggatggagaacctgtttgccaggctgccgccggagcgcgcgagggcctccagcctgcaggtgctcccgcgcccaccagggtctccgatctcccacaccccccgcctcaccgtccacactcaaattccagaatcccagcccctagtcactccttttggggaattctagggtcccgtgccaaactgctactttccagacctgcactgcacgaaggcaaccattccaaggctggagaccggagtggaacagggtctgtttcccacgccgtcagcgggggccgtggctgccggcgccagagacaaaggcctctgcccgcttgtcacctaattaaagcattttctctggtccaaggcccacctccagcatcgccaaccccgagcagggcaggctaacgtagggtccagccctacggggctttgcgggtgggtgttcttcccctgtgaggagaggagagattgtaagaaataaagacacaagacaaagagataaagagaaaacagctgggcccgggggaccactaccatcaagacgcagagaccggtagtggccccgaatggctgggcgcgctgatatttattgtatacaagacaagggggggcaggataaggagggtgagtcgtccaaatgactgataaggtcaagcaagtcacgtgatcatgggacagggggcccttcccttttaggcagccgaagcagaaagagaaggcagcatatgtcagcgttttcttctctgc[139 bp omitted]cggtgaaaccctgtctctactaaaaatacaaaaaattatccgggcgcgtggtggagggcgcctgtagtcctagctatttgggagggtgaggcaggagaatggtgtgaacccaggaggcggagattgcagtgagccgagatcacgccactgcactccagcctgggggacagagcgagactccgcctcaaaaaaaaaaaaaaaaaggctttcactatttcttctaccgctatctactacgaacttcaaagaggaaccaggagtacgggaggaaaatgcaagaggacaaggagcgtgaccattgaagcacagcacagcaggatgactgcgggcaggcctagataatacccagcctcccacaagaagctggtggagcagagtgttccctgactcctccaagaaaaggagattccctttcgtggtctgctgagtaacgggtgccttcccagacactggcgttcccgcttgaccaaggagccctcaagaggcccttatgccggtgtgacagaaggctcacctcttgccttctaggtcacttctcacaatgtcccttcagtacctgaccctatacccaccggttgtttcctggttatattagttatacaacaaagaataaaagtaatagctaatgattaataatgtttacactaatgattgatactgtccatgatcatctctatatctaatttgtatgataactattcttattctaactattttctttattatactgaaacagtttgtgccttcagtctcttgcctcggcacctgggtaatccttccccacagactgaccctcccattcaagatacatcaatgtcaaagactcaggagtttgacttgattcccagaagtttaaccatcatctccccaggctcgggactcccagcacccagacccttctgctcacacccagcagtccaggcccccagaccctcctccctcagacttaggagtccaggctcccggcccctccttcctcagacccaggagtccaagccccctgcccctccttcctcagacccaggagtccaggaccccagcccctccttcctcacacccacgagtccagatccctagcccctactccctcagacccaggagtccagaccaaagctccctcctccctcagacccaggagcccaagttccccagcccctcctccctcagatccaggagtacaggcccagaccctcctccctcagacccaggagtccaggccccccacccctcctccctcagacccaggagtccagagccccagccctcctccctcagacacagaaggcctacccttgcacccttaggggctccaggaaattagccaacctgtcttccctctgggtgcccactccagggcctggcttggctgccaactccagtcagggactttcagccacccctccccccaggttatttcaggagcacctgcctgggcctgggatggcttctctggtgaaagaaacaccaggattgcatcagggaggaggaggctgggatgtccagggtctgagcatctgagcagggacagatgaggttgaggttggcccacggccaggtgagaggcttccaaggcaggatacttgtgtctcagatgcggtcgcttctttcatacagcaattgccgccttgctgaggatcaaggaacctcagtgtcagatcacgccctccccccaaacttagaaattcagatggggcgcagaaatttctcttgttctgcgtgatctgcatagatggtccaagaggtggtttttccaggagcccagcacccctcctccctccgactcaggtgcttgagaccccagatccttctctctgagactcaggaatgtgggcccccagcccctttcacctgggtcccagctaacccgatcctcccctccctcatcccctagacccaggagtctggccctccattgaaaggaccccaggttacatcatccattcaggctgcccttgccacgatggaattctgtagctcctgccaaatgggtcaaatatcatggttcaggcgcagggagggtgattgggcgggcctgtctgggtataaattctggagcttctgcatctatcccaaaaaacaagggtgttctgtcagctgaggatccagccgaaagaggagccaggcactcaggccacctgagtctactcacctggacaactggaatctggcaccaattctaaaccactcagcttctccgagctcacaccccggagatcacctgaggacccgagccattgatggactcggacgagaccgggttcgagcactcaggactgtgggtttctgtgctggctggtcttctgctgggagcctgccaggcacaccccatccctgactccagtcctctcctgcaattcgggggccaagtccggcagcggtacctctacacagatgatgcccagcagacagaagcccacctggagatcagggaggatgggacggtggggggcgctgctgaccagagccccgaaagtgagtgtgggccagagcctgggtctgagggaggaggggctgtgggtctggattcctgggtctgagggaggaggggctgggggccttggcccctgggtctgagggaggaggggctggggatctggactcctgggtctgagggaggaggggctggggatctgggcccctgggtctgagggaggaggggctgggtctggacccctgggtctgagggaggaggggctgggggtctggactcttgggtttgaaggaggaagggctggggtcctggactcttgggtctgagttgggagggggctttggcttgggcttctcctgggtctgagggaggaggtaggctgtgggcttggactcccagggctgggacagagccggatggtgggacagagtcgggtggtgggacagtcccgggtgggagaggtcctcgaaccaccttatcgctttcaccccttaggtctcctgcagctgaaagccttgaagccgggagttattcaaatcttgggagtcaagacatccaggttcctgtgccagcggccagatggggccctgtatggatcggtgagtttccaggaccctcctcaccacccaccatgctcctcctatatgtcgccctcacagcctggggtgccttgtcttgctcatcccccccggagccagacttgattctatttgctctgcacgcccccagctgcaacatttggaggttgaagttgtcatcagtgtttgcaagatgaggaaactgaggcccaggccggggcgccagtgacctcaatcatgtgatgtgtggatgctggagcggcctgaggctcaggttattgggagtctcgtgattcagtaacccctgctcctgcccacacggcccctgtgtgcacggctcatgctgggcacagggacactcggggaagccatggccagtaaagtgaccaggaccttgagtgctagggagacaccccgcctggcctgagagagcactgatggctccgagggctggaatgttctctgtgaagtctgaactgggaggcaggtccctgcaggagagccctggggtaaaaaacaaaacctgccttgctgttttgtttcctagaggaggggctgggggcctggactcctgggtctgagggaggaggggctgggggcctggacccctgggtctgagggaggaggggctggggcctggaaccccgggtctgagggaggagaggctggggcctggaaccccgggtctgagggaggagaggctggggcctggaaccccgggtctgagggaggaggcgctgggggcctggactcctgggtcggatggaggagaaactagggtctggacccctgggtctgagggaggaggcgctgggggcctggacccctgggtctgagggaggcagggctggggcctggatcctgggtcttacatcaggaaaacagaggaaccctgtctctgatcctgtttttgtcccctagctccactttgaccctgaggcctgcagcttccgggagctgcttcttgaggacggatacaatgtttaccagtccgaagcccacggcctcccgctgcacctgccagggaacaagtccccacaccgggaccctgcaccccgaggaccagctcgcttcctgccactaccaggcctgccccccgcactcccggagccacccggaatcctggccccccagccccccgatgtgggctcctcggaccctctgagcatggtgggaccttcccagggccgaagccccagctacgcttcctgaagccagaggctgtttactatgacatctcctctttatttattaggttatttatcttatttatttttttatttttcttacttgagataataaagagttccagaggaggataagaatgagcatgtgtgagtgtctgagggaagacatggcagctgttttgtctcccttggcccggacaatcccctctacacctcccctcacgtggtccgagggtcctggcttcccactgggcctcacttttttcttttcttttctttttttttttttgagacggagtctcgctctgtcacccaggctggagtgcagtggcgcgatcttggctcactccaacctccgcctcccaggttcaagcaattctcctgcctcagccacccgagtagctgtgattacaggcgtgcgccaccacacccagctaattttgtaattttagtagagacagggtttcgccatgttggccaggatgctctccatctcttgacttcatgacctgcctgccttggcctcccaaagtgctgggattacaggcttgagtcactgtgcccagcccagcctcacttttctactctgctaaagtgtccccagggactgt[213 bp omitted]aggctgaggcagaatggcgtgaatgcgggaggcggagcttgcagtgagccgagatcgcgccactgcactccagcccaggccacagagcgagattccatctcaaaaaaataaataaataaataaataaataaataaatataaaaataaaatgaaagagcaggacttctttctacaacccctcaacttgtgtgagcgttgtgtaactatttcatagagctacctcgataacaggggagcttttacgaggtgacacagcacactcacatcctcatgggagatgtagttttctggcatcatttagcagcaggaatgagatctgttgggcctcaaatctgggacaaggactcctgggtcctggagtaggtttggggctagtgtaacacccaagttctggggaatcagtgggctggacatctggacacctggatcacaggagaactggggactgcagacttaggcatcctggtctgagaaaaaaggggctggagggtgggagtttgggttctcaggaaaaggagctgaaacctggaattcttccatctgggtccttatgaactttttaatatttatttatttatttatcttattttgttttttttctgagatggagtctcgctctgtcaccaggcccaagtgcagtggcacaatctcggctccctgcaacctccgtctcctgggttcaagcgattctcctgccttagcctcccgagtagctgggactacagacaagcgccaccacacccgtttgtttgtttgattgcttgtttgtttgttttgagacagagtttccctcttgttgccaaggctggagtgcaatggcacaatctcggctcaccacaatctccgcctcccggcttcaagtgattctcctgcctcagcctcccgagtagctgggattatgggcatgcgccaccatgcccagataattttgtatttttagtagagatggggtttctccatgttggtcaggctggtctcgaactccccacctcaggtgatccgcccgcctcagcctcccaaagtgctggggttataggcgtgagccaccacgcctggctgcttgttttttgagacagagtctcgctctgttgcccaggctggagtgcagtggcacaatcttggttcactgccacctctgtctcctgggcttaagcgattctcagctctggagtagctaggattacaggcaccaccactatggccagctaatttttgtgtttttagtagagacggggtttcaccatgttggtcaggctggtctcaaattcttgacctcaagtgatctgcccaccttggcctctcaaagtgctgggattacaggcgtgagatactgcacccggcgtttacttttatttatttgtttgtttgtttgtttatttttgagacagagtctctctctgccacccaggctggagtgcagtggtgcaatctcagctcactgcaacctccacctcctgtattcaagcgattctcctgtctcagcctcccaagtagctgggattacaggtgtgtgccaaccctcccggcttggacttcagctgggactccttccatgggggtccttatgtaatgagcgtcatagattccagtcccggcaagcaagttgcccggtctcgctcccctcacgcaaccgagatttccatattgttcttcaagccacttcctggtaggaaggaagctggcctgggccagccccagttgctgcagccgggtgggagttgtcatcctggacccttcattttaagtccaaagttcaagtgagagaaatatcacagtcaaaaggacctaactgtgggtggccgagggtcactggagggacttgatgcccagaaaaaatgaaagtcaccatttgtagaaagggtagttttcaactctgatcacacaagcctggctcagtcaagggaaggaaatagaatttgaaatttcacaaagctcccgagcagtggtttaggtcctgggggtgactcaggtgacacgtaagttccttgtcagaagagaccgcatactgctgtcaaggaaaggcgaggtggccagtgtggaaagaggagggagcactgggcaccatcctgacccggttcccacccgcccgccatgccaggctggagaccaggagacacagacccagagggaaggtcagagcccaacatccagagagaaggggggacagggacctgatgggggggtcagagacccagagatagggagacagagacccagagagagagggagagtcccagagagagggagacagagacccagagagagagggcaacagagacccagagagagagggggacagagacccagagagagagggagacagagacccagagagagagggggacagagacccagagagagagggggacagagacccagagagagagggggacagagacccagagagggggacagagacccagggaaaaaggaagacagagactcagagagagaaggggacagagacccagagagagagggagagtcccagagagagggagacagagacccagagagaaagggggacaaagacccagagagagagggggacagagacccagagagagaggggaacagagacccagggaaaaaggaagacagagactcagagagagaaggggacagagacccagagagagagggggacagagacccagagagagagggggacagagacccagggaaaaaggaagacagagactcagagagagtaggggacagagacccagagagagagggagagtcccagagagagggagacagagacacagagagaaagggggacaaagacccagagagagggggggacagagacccagagagagagggggacagagacccagagagagagggggatagagacccagagagagagggggacagagacccagagagagggggggcagagacccagggaaaaaggaagacagagactcagagagagggacagagacccagaggaaggggggggacagagacccagagagagagggggacagagacccagagagagagggggacagagacccagagagagagggggacagagacccagagagagaggggaacagagacccacagagaggggggacagagacccagagagaggaggacagagacccagagagagaggggaacagagacccacagagagggggaacagagacccagagagaggaggacagagacccagagagagagggggacagagacccacagagagggggacagagacacagagagagagggacagagacccagagagagagggggacataggcccagagagaggggggacagaggcccagagagagggggacagagacccgggggatgacagaggcccagagagagagggggacagagacccagagagagagggggacagaggcccagagagagggagacagagacccggggagtgggggacagagacccagagagagaggggaacagaggcccagagagagggggacagagacccagagagaggacagagacctagagggaggagaagacccagggaaaagggagacagagacccagagagagaggaacagagatccacagacagagggggacagagacccagagagaggaaaggcaggcagggaagctgagaaatgtgttcaaatggggacacttcactgtacctgaggaccttgaactcccaaccctgttgtacccacttcctgtagaaggagccgctttcctcatctggacagtctggggtcccctgtctgcaaagcctgtcctaggttgctgtctcgcagggaaccacggatcctccgcagggtcaagccccccagctctggatgcttccagacctgcgtccagactcagctcccggcaggttgtacaggatgagctgcagggtgtgggcggtgagggctgccatatgcacccggagaactgcaagaccttgctcactgatattgacagaacccacactgagaagccggtctgggacgggatcactggggaatgatggggcatgatggaagcaattgaatgttgaattgggatgaatttattgacagagattccacactcaagcattggctataggggctgggagtgactctagttcgctctttggttgagtgaaatctgcatcccaaatcctttgcaaacgttggccaggtgcagcggctcacgcttgtaatcccagcactttgggaggctgaggcaggaggataacttaaggccaggaatttgagaccagcctgggcaacataacgagacaccatctctacaaaaattaaaatttcgggccaggcacggtggttcaagcctgtaatcccagcactttgtaaggc[134 bp omitted]gaggcatgagaatcgcttgaacccaggaggcaaaggttgcagtcagccgagatcgtgccactgcactccagcctggcgacacagcgagactccgtctatttaaaaaaaaaaaagaaagaaattcaactaccctggagcctgaggtgtgaggatcacctgagcctggaagattgatggtggctgtgccacagcactacagcctgcacgacacagtgagatctgtctctaaaaaataaaaaattagaccaggcatggtggcttacacctgtaatcccagcactttgggaggctgagtggggaggattgttcgagaccaggagtttgagaccagcctgggtaacatagcgagattcccgtctctacaaaaaatagaaaaattagccaggtgtaatcccagctactcgtggggctcaggtgggaggctcacttgagcccaggaggtcaaggctgcatgaggtattacggctccactgcaccccagaacaagcaggctacagagcaagactccacctaaaaaaaatttttttttcctctgttgtgtctatttcctctcatgctctttctaatagagccttcacttatgatttttttttcttttttttttttgagatggagtctcactctgtcgcccaggctggagtgcagtggcatgatttcggctcactgcaaccgccgcctcccaggatcaagcaattctcctgcctcagcctcccaggtagctgggactacaggcgcgcaccaccacacctggctaatttttgtatttttagtagtgacggggttttgcttattgaccaggttgttcttcaactcctggcctcaggtgatccgtccacctcagcctcccaaagtgctgggattacaagcgtgagccactgtgcttggccctggctagtttaacttttacttttgtacagacagggtctcactatgttggccaggctggtcttgaactcctgggctcaagccatcctcccacctcggcctcccacagtgctgggattataggtgtgagctactgcgcctgactctttgtcttaatttccctcttcctataaggacgccagtcacataggatttagcacacaccccaacccagtatgagctcacctgaacttgattccatctacaaagaccctatttcccaggaagatcacattcagaggttccaggtagacctgaagcttccaggacactattttccctcagtgcacagctctacataaatttggtcacactcttcttcttcttcttcttctttgcagacagagtttcactcttgttgcccaggctggggtgcaatgacacaatttcggttcaccgcaacctccgctgcccaggttcaagcgattctcctgcctcagcctccggagtggctgggattacaggcatgcaccaccaagcctggctaattttgtatttttagtagagatggggtttcaccatgttggtcaggctggtctcgaactcccgacctcaggagatccgcccgcctcggcctctcaaagttttgggattacaggtgtgaaccaccacggccagcctcacactcctcttcttttcctcacatttaagtgagctgtacccttaggagaaagttgcacagttagcactagggtgggccaggatagctttctgagccttaaaaatcttaaagtttggctgagaccagcctgacgaacatggagaaaccccgtctctactaaaaatacaaaagtagcttggtgtggtggtgcatgcctataatcccagctactcgggaggctggggcagtagaatcgcttgaacctgggaggcagaggttgtggtgagccaagattgcgccactgcactccagcctgggcaacaagaggtaaactccatctcacaaaattaaaaaaaaatttcttttaagtttggccaggcacggtggctcacgcctgtaatcccagcagtttgggaggctgaggcaggtgaatcccctgaggttaggagttcaagaccaatctggcccacatggtgaaacctgcctctactaaaattaaaaaaattagctgggtgcagtggtgtgcacctgaggtcccagctactcgggaggttgaggcacaggaatctcttgaacccaggaggcagaggctgtaggcagctgagatcgtgccactgcattccaacctgggcgacagagcaagactctgtctaaaaaaaaaaaagaaaagaaaaagaaaactctctgggcatggtggtgggcacctgaggtcccagctactcaggaggctgaggaaggagaatcgcttgaacccaggaggcggaggttgcagtgagccaagatcatgccactgcacttcagcctgggcgacagagcgagcccgtctctctctctgtctatatatatatatacacacacacacaataaataaataggttggctctttgctgtttccccacagtactgtattcaatatataaccactcagcacagccacctctccaatgttcaggagcaaactcttatctccttggttcttgcccccaccattatcagaaccttccctctgttttactctctgagcgcctgccaagatcagtttgggttttgtttctctattagttttcacccgtgtggagcttcgtccttccaagagggaggttctactgagtgagcacttcccagatccctggggagccaggctatttagcatctttcagcttctccaccgcaccctatcctcacctactcactggagcccctagagatttgactactgttcttgttttcttttctttttttgggggggtgggggagggggacagggtcactgtcgcccaggctggagtgcagtggcatgattttggctcactgcaacctctgcctcccaggttcaagcaattctcctgcctcagcctcctaagtagctgggattacaggtgcccccacctcgttaattttggggggtttttgttttgcttttttttgagagagaatctcgctctgttgcccgggctggagtgcagtgggctcactggaacctctgcctcccgggttcaagagattctcatgcttcagcctcccaagtagctgggacttcaggtttgcgccaccatgcccagctaatttttgcatttttagtagagacagggtttcgccatgttggccaggctgctctccaactcctgacctcaagtgaactgcctgccttggcctcccaaagtgctgggattacaagcgtgagccactgcacctggccctggctagttcttttaacttttactttggtacagacagggtcatgttggccaggctggtcttgaactcctgggctcaagcaatcctcccacctcggcctctcaaagtgctggggttataggtgtgagctaccacgcttggctctttgtcttaatttccctcttcctataaggacaccaatcatataggacttagcgcacaccccaacccggtataacctcacctgaacttgatttcatctacaaaggccgtatttccaagtaaggacacattcagcggtaccaggtagacatgaagcttccaggacgctatttccccaatgcacacctctacacggagttagtcacactcctcttcttcttctttttttttttttttttaagacagtttctctcttgttgcccaggctggagtgcaatggcatgatttcggctcactgcaacctctgcctctcgggttcaagcaattctcctgcctcagcctcccaagtagctgggattacaggcatgtgccaccacatctggctaattttgtatttttagtagagacagggtttctccatgttggtcaggctggtctcgaactcctgacctcaggtgatacgcctgccttggcctcccacagtgctgggattacaggcgtaagccaccgcacctggcctcacactcctcttctttttctctcatttaagtgagccgtacccttaggaggaagttgcacagttgacattagggtggg[137 bp omitted]aaggtgaaaccctgtctctactaaaattacaaacattagctgggcgtggtggtgcacacctgcggtcccagttacttgggaggttg[136 bp omitted]ctgcctcagcct[131 bp omitted]tcggcctcccaaagtgctgaggcacaggaatctcttgaacccaggaggcagaggctgcagtgagctgagatcacgccactgcactccaacctgggcaacagagcaagactccatctcaaaacaaaacaaaaaaactatctgggcatggtggtgggcacctgtaatcccagctactcgggaggctgaggcaggagaatcgcttgaacccaggaggcggaggttgcagtgagccaagatcacaccactgcactccagcctgggtgacagagcgagcccctgtctcaaaaaattaaatatataaataacaaataaataaataggctgactctttgctgtttccccacagtattgtatgcaatatataaccactcagcacagccacctctccaacgttcaggagcaaactctatctccttggttcttgcccccaccattatcagaaccttccctctgctttactctctgagcgcctgccaagatcagtttgggttttgtttctctattagttttcaccagtgtggagcttcgtccttccaagagggaggttctactgagtgagcacttcccagatccctggggagccaggctatttagcatctttcagcttctccaccacaccctatcctcacctactcactggagcccctagagatttgactactgttcttgttttcttttctttttttttcggaggggtggagggggacagggtcactgtcgcccaggctggagtgcagtggcacaatctcagctctctgcaacctctgcctcccaggttcaagcaattctcctgcctcagcctcctaagtggctcagattacaggtgcctccacctggctaattttttggaggttttttgtttttgtttttgttttttttgttttttttttttgtttttttttgagagaaagaatctcgctctgttgcccgggctggagtgcagtgggctcactggaacctccgcctcccgggttcaagagattctcgtgcttcagcctcccaagtagctgggacttcaggtttgcgctaccatgcccggctaatttttgtatttttagtagagacagggtttcaccatgttggccaggcggctctcagaactcctgacctcaagtgatctgcccgcctcggccacccaaagtgttggattacaagcgtaagccattgcacctggccgaaaaccaatctgtatcataaccccacggcacctgaatcatttctaagtgtacagttaagtcgcgttaagtatattcacattgttgcacaaccaatcttcagaattttttcatctgataaaattgaaactctctgccgcaattaaatcccacttccccaattctcctcccttcagctcctggccactttttccagccccatttgttgaaaacatggtggtgagctccttgaatgactgagaagcttttgtacatggacaggaaaattcacaacaatttgtttttttgttaatgatcaatgaatttttaaacaattatctttcctttaaacattcacagactacttctacagctaaaaataacaagccacaaatttcacaattgtagatttcgcctaaatatttgaacagtgattgcacatttaatcagtgaacttttcacaaatctgatattgtggtttcccttaaatgccatgaataggagaaaaacagtaatacactctgtcatacttttcacaagtctgatataccagattcttacaaatgctttaaatattttcgagaaggctgggcaaggtggcttacacctgtaatctcagcactttgagaggccaaggtagaaggatcacctgagcccaggagttctaaaccagactgggcaacatagcaaaagcccatctctaccaaaaaaaaaaaaaaaaaaattagccaagtgtggtgaagcgcacctgtagtcccagctagttaagaggctgaggtgggaggatcacttgagctggggaggtcaaggctacagtgagctgtgatcacaccactgcactccaacctgggtga[136 bp omitted]aaaaattagccgaaagtagcccagtatggtggcgcatgcctgtaatcccagctaattaagtggctgaggcaggagaatcacttgaacctgggaggcggaggttgcagtgagctgagatcacgctattgcactccagcctgggcgacaaaagcgaaactccgtctcaaaaaataccctcccagagagctcccttaccctttcaccaagtggaaacacagcaagaaggtgccagcaatgaacaaggaaactggcccacaccagacacagaatatgctgctgccttgatgttggactccacaccctccagaactatgagagatacatatttgttccttaagctacacagtctgtggtatttttgttacaacagcctgaatgccctcttccaagtcaattctcaccaagccgacattccagggcaaagcccgtgttatcttagagtttgtcgtaaccacatgaattgggttatttatttatttatttatttatgagacgcagttttgctcgtcacccaggctggagtgcaatggcaagatctcggttcactgcaacctcctcctcctagattcaaatgattctcccgcctc[134 bp omitted]ctcggcgtcccaaagtgttgggatttcaggcgtgagccaccgcgcccagtcgactcagagtgtcttatttttataatacagcctgaaaaacttgttctaagtcatagtattgtaataggttgggacatgagatgatttcacggctgtttgttccaggaccttctccgggaaacgtgtggggcatttcctctttgttacacactcagggtgagcccatttttcctctacttgtttgggtgaagcttcgccgctgtctctgccacaaagctgaccctccagctctgtgacccccttggcagctggcaccagcagcacggggccctggcagggcgctggctggcaggaggaggggtgtagggatttctcacaagaccctagttccacactgcgtcttgccaggagccagggacagcaatggctccagcttcctgttactttctgctcttccggaagtagatttccaggcccctcagagagaggtcccagactccattaggccacaccctcttggaggtgagagacccgctgcctgcagcccactccctagaggtctatttggtttgcatagtcgccgttttttcataataaaacttaaaaaaaaaaaaaagaccaattaaaacctgtaaaacaggtggcaggtgatcaggattagaatgctttgaaatcttttgttattctggaatatgacagaatgattatatttagatttggtcactttaaggatgcatgttaaaatttcaagagtgggccaggcgctgtggcacacccttgtgatccgagcactttgggagaccgaggcaggaggatcgattccttgagcccaggagttcgagaccagcctgggtaacatggtgaaacaccgtctctaaaaaaacatacaaaaatgtgccgggcatggtggcacacacctacagtcccagctacttgggaggctgaagtgggtgggtcgcctgaattcaggagtttgaggctgcagtgagctatgattgcaccattgcactccagcctaggtgacagagcaagaccctgtctctaaaaataaataaataaattttcttaacttggaaacagtcacaaacatttaaaaatttggaagtacagtacaagcaattcttattttccagaaccatttgaaagtcacatgtgcccttgaaaccccatcactacattaacacatactccagtgtgtactttctgcaaacaaggacattctcctacacaaccacagcagggccgccaaaatcaggaaagtagccttgacccacgactactctggaatcatcagacctccttcatgtttgccacatgtcccagtgatgctttttatggcaaaagaatgcagttcagagccgggagcggtggctcacgcctgtaatcccaacactttgggaggccaaggcgggcggatcacctgaagtcaggagttcgagaccactctggccaacatggcaaaaccccgtctctactaaaaatgcaaaaattaccaaaaatggatgcctgtaaccccagctactcggaaggctgaggcaggagaatcacttgaaccctggaggaggaggttgcagtgagccgagatcgtgccactgcactccagcccagatgacaagagtgaaactctgtctcaaaaataataataataataataataataaaatagccgggcgtggtggcgggcatctgtaatcccagctactcaggaggctgaggcaggagaatctcttgaacccgggaggtggaggttgtagtgagccatgattgcaccaccgcactccagcctgggcaacaaagcgagactctgctctccccactgccaaaaaaagaatgcagttcagggtcatgcactgcttctgagggcaggtctctttgaaagtcaggaaggacagttcctcagtcttccctggtgttcatgaccttggcatttggaacattacaggccggttatcgagtcgtctctccctccatgtggatttatttgatgtttcctcgtgatcggattctttggcagcacaacgactgagatcatgttgtgtgtttctcactggaagtcaggtcactcgcggcgtccacctctccagtttctgatgacatttgcttcagtcacatgatgcaagtggcatcagccggacttgtccttgccaagcaatgagagctttgaaactatactaatatcacattcctcaggaaatcttcaggattttttgttttctttttttttttttttttttttttcagacagagtctcactctgtcgcccaggcttgagtgcaatggcgcgatcttggctcactgcaacctctgcctcccgggttcaagcaattctcctgcctcagccttctgagtagctgggattacaggtacatgccaccacagccagctaatttttgtatttttagtaaagatggggtttcaccatgttggtcaggctggtctcgaactcctgacctcatgatccacccgccttggcctctcaaagtgctgagattacaggcgtgacccactgcgcctgggccattttttttgttttttttgagatggagtcttgctgtgtcgcccgggctggagtgcagtgctacaatttggctcactacttcagtctcccagcctcaagcgactcccacctcagcctcccaagtagctaggaccacaggcacacgctatgacacccagctaattgtttgtctttttggtagagacggggtttc[131 bp omitted]tagagacagggtcttgctctattgcccaggctggaatgcagtgatgcaatcacagctcactgcagccttgacctcactggactcagtgatcctcccacctcagcctcctgagtagctgggaacagaatgccatcactgcaggatgccatgcctggcccttccagttattaatggatttatttatgtctgtgtggactcatggtttcctattttattccatgagttataatcagttatatcattctctatttttggtgttcaaactcatttattttgatgctctttttatttacttttttttctttcaagacagagtctccatctgtcacccagcctagagtgcagtggcgcgatctcggctcactgcaacctccacctcctgggttcaagtgattctcctgcctcagcctcctgagtagctgggactacaggcgtgcaccaccacactcggctaatttttttgtatttttagtagagacgaggtttcaccatgttggtcaggctggtctcaaatccctgacctcgtgatctgcctgcctcagcctcccaaagtgctgggattataggcgtgagccaccgtacccggctctttatttactttttggggtactctgtatttagtcctctattttcccaatgggagccccctcaagctggtggctatgtgctttgtttgtttgtttgtttttgagacagggtcttgctctgtcacccaggctggagtgcagtgatgtgattcggctcactgctacctccgcctcccaggctcaagccttcctcccacttca[134 bp omitted]cagcctcgcaaagtgctgggattgcagatgtgagccaccgcgcccagcctgtttgtttgttttaatcagctctcaagggcttggaaaccatgcgtttttgacaggcctccattagtcacacttgagtcgttcctgatttctggtacagcaaaatgttctaggctcattttttttctttctctaaaccagctctagaatcagctgtttctccaaggagccctggttccttttagaatgggaagccaagatccaaacactaacagggctcgttgcttttgtttttgaattttgtctgctaatggatcctctcaggggacggattacatatacacacacacacacacacacacacacacacacacacacacacaccacgcacatatgtggggccaggcacagtggctcacacctgtaatctcagcactttgggaggctgaggcaggaggactgcttgagcccaagagtttgagaccagcctacgcaacatagtgaggcccagtctctactaataatttaaaaattagccaggcgtggtggtgcacacctgtggtcccagctactcagaaggctgaggatggaggatcgcttgagcccatgaggcagagtctgcagtgacgcatgatcgtgccactgcattccagcctgagcaacagagagacactccatctcaacgaacaaatatatacatgtatgtgtgtagtatattgtatatatcacattgtacctcatatattacattatatactacagatatcacattgtatattatatatccaccatgtaatatgtctattatatctattttgtgcatgttatgtatatatgtgtatatatatctacataggaggtatgtatacatagacacacatatattaggtatgtatacatttgtatatttccatatctatttctgcatattgagaacgacacatccaattcaaatccaatatctggccaggcatggtggctgatgcctgtaataccaacactttggaaggccgaggtgggtggatcacttgaggtcaggagtttgagaccagcctggccaacatagcaaaaccccatctctaccaaaaatacaaaaattagctgagtgtgatggcaggcgcccacaatcccagctactcaggaggctgaggtggaagaatcacttgaacctgggaggcagaggctgcagtgagccaagatggtgccactgtacttcagcctgggagacagagtgagactccatctcaaaaaaaaaaaaaaaaagaaatccaacacctagactgggtgccgtggctcatgcctataatcccagcactttgggaggccaaggcgggcagatcactagaggtcaggagtttgagaccaacctggccgatatggtgaaacgctgtctccactaaaaatacaaaaattagctgggtgtggtgctggaggcctctaatcctagctactcgggtggctgaggcaggagaatcgcttgaatccaggaggtggaggttgcagtgagccaagattatgccacttcactccagcctggacaacagagtgagactctgtctcaaaaaaataaataaataaagacaaattcaatacctctagttctctccctttccatatttatatctgccttttctgacagtgagaaatatgacttcattttcttaatttccttatcggtcaattctcctctatgttagccatctctcatctccacagctgtcccctccttccacctcccctgtgccctctgcacccagcttgggctgacttcccgagctacagccccccatcctattagcctaggggacttacgtttcctacttgggtgccccccactgtgctgagctgctcacatcagtaaatgcctccttcaccccactaaggccctgacaccccacttctgggccactgtgcccccaacaccccaagctggccttgcctgccccacctcaaaccttagaactttatcgttcaggaagacaaatttagggaaggggaagaatgccgatttctatttaatgtatttgaccatatcaatgttttcttttctggcctctgaagtttgagtcacggtcatgcccatgttataaaataattttccaatgcttacttctcactcgttatggtttcctatctgatactgaagactttgatccatctggagtttattcagtgggttatttttatttttttattccttccttcacttggattgaatgggttttctgtattcccgctttttcatatttacttttttaatcaaagttatatatgtacacagtaaagtcacacagtgctacgtgttcagtttaaccttccccatgctgtcccattggtaactgatctctgaattagttatagcaatgtgaaacactgggacggacccacactaaaatatcagtggtttgaacaattgtttttttttttttttttttgagacggagtctcactctttcatccgggctggaatgcagtggtgcgatcactacaacctctgcctcccgggttcaagcgattctcctgcctcagtctccggggtaggtgggattacaggcacctgccactatgcccagctaattttttgtatttttagtagacacagggtttcaccatgttggccaggctggtctggaactcctgatctcgtgatttgccggcctcggcctcccaaagtgctgagtggccgtgagccaccgtgcctggcctaattgattttttttttttttttttttacagagagatggggtctcactatgttgcccagtagtctcaaactcctgggttcaagcaaccctcttgccttggcctcccaaagcactgggattacaggtgtgagccactgcacctggccctacagttgatttttgtttctattcatgtaaagtctaactagtagaaagacagagggtcaaggactcaggctgatagcagctctgtcattttcttttttttttcttcttcttcttctattttttttggtgagatggagatttactcttgttgcccaggctggagtgcaatggcgcgatctcggctcaccgcatcctccgcctcccgggttcaagcgattctcctgcctc[221 bp omitted]ggatgtgggacgcaggctcccaggtgaaccgcaatgatccccacctcttggtatctatgccatgtgcattcctttcccacattacactagggttggcctttgtgatggatatcacagggcagaagtggtgggatgggccaggcagtcgctcacacctgtaatcccagcactttaggaggctgaggcaggaggatcacttgagcccaagaggtcaagaccagcctgaggcccccatctctacaaaaaatttaaaaattaggccgggcgcagtggctcatgcctgtaatcccagcactctgggaggcagaggtgggcggatcacctgaggtcgggagttcgagaccagcctgaccaacatggagaaactctgtctctactaaaaaaatacaaaattagccgggcgtagtgggatgtaatcccagctacttgggaggctgaggcaggagaatcgcttaaacccgggaggtggaggttgtggtgagttgagatcgcaccattgcactccagcctgggcaataagagcaaaactccgtctcaaaaaattaaaaaaaaattttaattggctgggtgtggtggcgtgtgcccatggtcccagctacttggcaggctgaggcaggagtatcacttgagcctaggaagttgaggctccagtgagccatgaccgcaccactgcactccagccttgatgacagagggggaccctgtctcaagaaaaaaaaaaaaaaggaatggtgggatatgacatctgagactaggctacaaagactgcggcttccatcgtggtctctctctcactctctctttcatcacttgctctgggagaagctagtggccaagacacgaggaatgcccaagcagcccatgcagacatcaacagccagcgaggaactaaggcctccagccaacagccctgtgagtgagctcggataggccaggctcagtggctcacacctgtaataccagcattttgggaggccaaagcaagtggataacttgaagccaggtgttcgagaaccagcctggccaacatggtgaaatcccgtctctacttaaaaatacaaaaaattagctgggtgtggtggcacgtgcctgtaatcccagctactcgggaggctgacgcaggagaatcacttaaacctgggaggcaaaggtttcagtgagtggagactgtgccactgcactccagcctgggcaacagagtgagactctgagactctgtctcgagagaaaaaaaaaaagagggttctccagcctctgtcgagccttcacatgactgcagtcctggctgacaagcttgactgaaacctgaaccaggaacacccagccgagctgcttgggattcctgaccctccagaaactatgtgagaaggccaggcaccatggctgacacctgtaatcccagaactttgggaggccgaggcaggcagaccacttgaggtcag[141 bp omitted]gcagtgggtgcctgtggtcccagctacttgggaggctgaggcaggaaaatggcgtgaacccaggagacagagcttgcagtgagcagagatcatgccactgcactccagcctggtgacagagcgagactccgtctcaaaaaaaaaaaaaaaattagccaggtgtggtggtaggtgcctgtaatcccagctactaaaaaaaaaagagagagagagaagggaaaaaaaaaactatgtgatacaataaatatttgttgtttaagctgtgaggaattaactcaggggtaatttgttagacagcaatagatgactactacactgctatctgcatccaaccggcaggtagagaaaagagagagggcacattagaagttccctaatgggtgtggctggaagtgaggcagggctcttctcattggccagaaccactcacataaccccagtgacttgcaaggggtgctgggagatataatccccccaggggcactgtcacacaataacaaatatatatttggtctctgtccccccagtttctgggacagagctttgaaaccccttataatttccccagtgttagggatgccagcagcatcttttgttctaatatttgatctttgaccccagttcccgacaaagggctcctaaatcccttggaatttcctgagtaatgggagcatcattttttcttttttctttttattttcttcttcccttttttttttttttttttttttttttttttgtttgagacagcgtcttgctctgtcaccaggctggagtgcagtggtgcaatctccacacactgcaacctctgcctcctgggttcaagcaagtctcctgcttcagcctcccaagtagctgggactacaggtgcccgccaccatgcctggctaatttttgtatttttagtagagacgggggtttcacca[138 bp omitted]tcctgatgggggctgatcaccagcaagactcagtcaatattagaagcatggaacctgtagccccatcccactccacatctttccggaagaagagggaactggagctggaattactaatctatcctacttatgcgctgaagtctccataaaagtccctaaagtatgggggtgggagaggttccttgtagcgtccagccctacagggccttgtgggttttctcttcgtgtgtggagatgagagattgtagaaagaaagacatgaaactaagagagagtatgaaagacagctgggcccagggggccactaccaccagtgcatggagtccattagtggcctcgaatgcctggactgctgctatttattgtatacaaggcaagggggcagggtaaggagtgtgagtcatctcaaatgattaataaggtcaagcaagtcacgtgtccatgtgacagggggcctttccctttttggtagacgaagcagagagggaagacagcatacggtcagcattttttctatgtacttatcagagagatcaaagactttaatattttcactatttctgctactgctatctcccaggaacttaaaagaggaaccaggtgtacaggcggaacatgaaagtggacaaggatcatgaccactgaagcacagtaccacagggagatgtttaagcctccggatgactgtgggcaggcctggctaatgtccggcctcccacaagaggctggtgaggcagagtgttctctaactcccccaaggaaggggaaactccctttcccggtctgctaagtaacgggtgccttcccaggcactggtgctaccactagaccaaggcgtccttaagcccttatctgggcgtggcggaggactttcactcttgtcttctggtcacatctcaccatgtcccttcagctcctgactctgtatcgcctggtttttcctcagttataataataaaacagagattaatactaaaactaataattgataatatccatatataatcatctctatatcctattgctagtataacttttcttattctaagtattttctttattatattgaaacagtatgtgccttcaatctcttgcctcagcacctgggtggctctctgcccacagttccgggcggggaagcaccccaactccatggagacgcccaacctggaagctcccccaaacccatcctttgctcccgtgctcgggaggcgttcagatgttgccctttgcacctctttatctgacaggttttatttaattatatgataaactgataaatgtgttttccttagttctgtgaggcattgtagcaaatttctgagcctaaggagggagtcatgggaacccccattactagcaagtcagaagctcgggtgagaccacgtggacttgtgattggcatctcccaaggggcagcctcgtgggactgagcctttcacctgtgggatccgatgctatctccaggtagataatgtcagagttggattgaattgtgggacacccagcttgggtaggagaatttgtcagcgtgggaaaaaccccacacacctggtcacagaagtgttgagtgtgagcctgagaaaaacaggtgtttttttctagataagatccatggaaggggaacacaatttttttttttttttgagacagctctctgtcgcctaggctggagtgcagtggcgcgatctcgactcactgcaagctccgcctctcgggttcacgccattctcctgccccagcctccctcctcccgagtagcggggactacaggcgcccaccaccacgcccggctaattttttgtatttttagtagagacggg[148 bp omitted]ttgctaaatttggtttcacggggaacacatttcctggcccctgggatttgggtgtgtatcctggtctgtgacgcaggccaggggctggcatgtgacgcgaaccgggggccacttcccgaagcaggtcagcgagaggcactctggagctgttgcccagccactagtgacgtcatgggctttcagtcattcctattgggtgctcttagtgctctatcctcaaactccgcaaccggcccttggaaaagactctgaactgaggcttctggaaaaaagaatccgagcttccacgtcatttcagaaatacccccctcaccttatttatttatttatttatttatttatttatttatttatttatttatttatttattgaaacaaggtctgactctgtcgcccaggatggagggcagtggcgcgatctctgctcactgcaacctggaactcctggactcaagcgatcccccacctcagcctcccgagtatctgggattacaggtactcgctaccacgctcagctaatttttaaattttttgtagaaatggggttttgccatgttgcccaggctggtctcgagcttctgagctcaagcgatctgcccgcctcgttctcccaaagggctaggattacaggcgtgagccaccgcgcctggcccccaaattcttttatgtttataaatttaaactgtacgccgggcgtggtggctcacgcctgtaatcctagcactttgggagtccaaggcaggtggatcacctgaggtcaggagttcaagaccagctgaccaacatggtgaaaccctgtctctactaaaaaatacaaaaaattagctgggcgtggtggcacacgcctggaatcccagctactcgggaggctgaggcag[136 bp omitted]cgtcatcatcagccaagggaaaacgtggatggggcagagtccaggagacaccaggcgtgagctttcagatgtcctcccccagtggagttctagacagtgctcaattctcccggtaatgacgtgtgccaaaacgcatgcagtattgccaaccagggagtctcaccccagatcttaggatgaaaaaaaaattttttttttttttttgagtcttgctttgtcacccaggctgaaatgcagtgtcatgatttcggctcactgcagactcaacctcccaggttcaagctattctcatgcctcacgagtagctgggattacaagggtacgccatcacacctggctaattttttaatttttatttatttatgtatttatttatttttgagacgaagtcttactctgtcacccaggctggagtgcagcggcgtgatctcggctcattgcagcttccgcctcctgggttcaagtgattctcctgctccagcctcccaagtagctgcaactacaggcgcccgccactctgcctggctaatttttggtttttgttttttgttttttttgagacggagtctcgccctgttgcccaggctggagagcaatggcgcagtctcggctcactgcaacctctgcctcctgggttcaagcgattctcctgcctcagcctcctgggtagctgggattataggcacctgccaccatgccgggctactttttgtatttttagtagagatggggtttcatgatgttggccaggctgttctcaaactcttggaccttgtgatccgcctgcctcggcctcccaaagttctaggattacaggcgtgagccaccaccatgctgggcctaatttttgtatttttagtagagacggggttttgccatgttgcccaggctagtcccgaactcctgggctcaaggaatctgcccgcctcggcctctcaaagtgctgggattacattcgtgaggcaccgtgcgcagtccgggggacaaaattttaaacaagtgttggtcatgtaagcatggcagactgcacgtgtgactgacctcagatactccagctgcctcctcctgaggggtggactagaacagggactggtaaccaggggttaaaggatcgggacctgacgcctaaatcttttgaatttacatgcaaaatatgggcatataacatgagcagtggttcaggatgtgggcaatgaagagagagagcctgagttcccccacctcttactactggagtaaccaggggcaggagacttctgaatttcagtattcttatctgcacaagtggaaacgagagaaatactgtagggcagtgccttctagcgggcttagaggaagcctctggacatggtagctattacttatttgcttagtctttagcattctgcacgttttgtttgtttgtttgagatggagtctctctctgtcacccaggctagagtgcagtggtgcgatctcagctcactgctacgtccacctcccgggttcaagtgattctcatg[131 bp omitted]cctcagcctcccaaagtgctgggatttacagttgtgagccaccccgcccagccagatgttcaaattttgatatggattaaattcagttactagatcactttttttttttttttttgagacaggcccttactgtgttgcccaggctggagtgtggtggcacgaccccatggctcactgcaacctcgacctcgtgctcaagcaatcctcccacctcagccttctcagtagttgggactgcaggcaggtgccaccatacccagctaagtttttgttgttgttgttgtagagaccaggtgcatgctgttaaaactaactacccgagactgggtaatttataaagaaaagaggtttaattgactcacagttccacagggctggggagtcctcaggagacttacaatcatagcaaaaggggaaggggaagcaaggcacgtcttatatagtggcaggagggagaaagagctagaggagggaaccaccacagtttcaaaccatcagatcttgtgcgaactcactcatgactacgagaacagcatgggggaaactgcccccacgatccagttacctcccaccatgtccctccctggacccgctgagattataattcataatgagatttcagtggggacacagagccaaaccatatcagttgccaaggctgatcttaaactcctgggctccagcaatcctcctgcctcagcctcccaaaatgctgggattataggcatgagctaccgtgcccagctgcatcgtcatcttaatactattgtcttccagtctataaacttgggatgtctttccatttatgtctgttacgaatttctttctttcttttgtgtattgtcagtctttcaccattgagtaggatgtttgctgtgggtttttcataaatgcctaagccagtgtttctgttttgttttgttttcttcttttttgagatggagtctaactcaggctggagtgcagtggtgtcatcttggctcactgcaaactctgcctcctgggatcaagcgaatctctcgcctcagcctctcaaatagctgggattacagacacctgccaccaagcctggctaatttttgtgtttttagtggaggcagggtttccccatgttggccaggccggactcgaacccctgacctcaagtgatctgtctgcctcggtctcccaaaaagctgggaatacacatgtgagccaccgcgccctgcctaagccagtgtttctatttttttttttttttttttttttgagatggagtctcactctgtcgcccaggctggagtgcaatggcacaatctcggctcactgcaacctgtgcctccggggttcaagtgattctcctgcctcagcctcctgagtacctgggattactgcccaccaccacactgggccaatttttgtatttttagtaga[132 bp omitted]tcaggggagtctttccaaacactcatcccttgagatgtttgtaaacttgtataatgccctaaaaatggttttaaccactcacacatttgtt[156 bp omitted]taataaaaatacaaaaaaaaattagccaggcgtggtggcaggtgcctgtagtcccagctacttgggaggctaaggcaggagaatggcgtgaacctgggaggcggagcttgcagtgagccgagatcgtgccactgcactccagcctgggcaacggagtgagactccgcctcaaaaaaaaaaaaaaaagacatagcacttgaacattaatttcctcagcaaggccatttttatttttatttttattttttgagatggagtttcgatcttgttgcccaggctggagtgcaatggcacaatctcagctcactgcaccctcggcttccgaggttcaagcaattctcctgtctcagcctcccgagtagctgggattacaggcatgcaccaccacgcccggctaatattgtatttttagtagagacggggtttctccatgttggtcaggctggtctcaaactcctgacctcaggtgatccgcccgccttgacctcccaaagtgctgggattacaggcatgagccactgagcccggccagcaaggccatttttactttctgcagaaaaggtacactcgccagcagttttgccacaagagtacaacgaacaaaggagacagggtcatttataacctgacgcatccactctactgccgtgtcgggtttccattggctggaacgggacctcacattctgtatttgtcccaactggctagcaacttggaactttttaaaagaggcaaaggcagaggagaacaaaggaagggggaagtgacttgtggaatgctgagaaaggtaaaaacaccttcaaataaggaagaggaacaggctgtgacctaatgcttgcttggaccagtataagcatgccagggcaaatatttagggtaaattgtgggagctaaaaacataaagtacactgatttctttattacggctagcagatatttaagaatgttagcacaggtctttgaatacattttgcgtctaagagaagttactatttattcctaagtagacgaggaggaaagtctctttgaagaggaagctctactttaatttttacacattgctaactgatgaaattgtatttggagactcactctgtaaattgcctctttccttagttttccattttttatttttagtttacttatttatttattttgagacacagtgtcactctgtcacccaggctggagtgcagtggctcaatcttagctcattgcaaactctgcctcccgggttcaagggattctcctgccaggctggcttcactatgttggccaggctggtctcaaactccagacctcaagtgatcttcccgcctcggcctcggaaagtgctgggatcacaggtgtgagccactgcgcccggccttctcctcttttggcctttgactttatactcaacactgaccaccagatggtgctgcaggcacaccacagcgtggcctgacacacagcacgctgtggctgggttattacagctgagatgtatttacctggatttattattttatttatttatttatttttcagtaggaaaggtagggcccgctatttaccaggtttttttttaagtgacagagaaagactgtcttaagcacacacacacacacacacacacacacacacacacacacacacacagagcttataaaacagtttaacggccgggcgcagtggctcatggcttaatcccagcattttaggaggctg[134 bp omitted]gaagcaggagaattgcttgaacctgggaggcggaggttgcagtgagccgagatcacgccattgcactctagcctgggcggcagagcgagactccatctcaaaaaaaaaaaaaaaaaaaaacagttaaaaaaaaaaaacagtttttaggccccattatgcctgtgtgattctttgtgtcctaatcttgggcgcacacacacacacacacacacacttatttatttttcttgagacagagtattgttctgttgcctaggctggagtgcagcgttgtgatctcagctcactgcagcctccacctcccaggttcaagtgattctcctgcctcagcctccagagtagctgagattacaggtgcccgccaccacacccggctaatttttctatttttagtagagacaggggtctcgccatgttcaccaggctggtctcaaactcctggcctcaggtgatccacccacctcggcctcccaaaatgctgggattactggcgtgagccacggcgcctagtcctgtttgttattttaaaatgaagacatccttaagcatgaaaatgtctttaaatattttgaaaaatgttttctaaagccatgaaggcctatagtaccctaagtcttatataattaaattataattaaagatttaatctggctgggcctggtggctcacacctgtaatcccagcactttaagaggc[216 bp omitted]agagcgagactccatctcaaaaaaaaaaaaaaaattattctttgcagatattcattttctcacagaattggactcttttttttctttttctttctttctttctttcttttttttttttttttttgagacagggtcttgctctgttacccaggctggagtgcagcggcatgaacacagctcactgcaacctggaattcttggcctaaacccatcctcctatctcagcctaccgaatagctgggaccataggcacacgccaccacatgcagctaatttttttattttttgtagaggagggggggtctcactatgttgcccagggtggtctcgaactcctgggctcaagtaatcctcctgccttggcctcccagaatgctgggattacaggcatgaggcaccaacacaaagttattttccaaagtgagctgcagcgccaacactcacacctactcactgtgtgcccagcactgctcatggatagcagttcttgaaccctttggtcccaagaccccttcacattctcaaaaatcactgaggctgagcacggtggctcacgcctgtaatcccagcacgttgggaggctgaggcgggcggatcacctgaggtcaggagttccagaccagcctggccaacatggtgaaaccccatctctactaaaaataccaaaaaaaaggccgggcgcggtgactcacgcctgtaatcccagcacgtcgggaggccgaggcgggtggatcacaaggtcaggagatcgagaccatcctggctaacacggtgaaaccccgtctctactaagaatacaaaaaatttagctgggcgtggtggcgggcgcctgtagtcccaggtactcgggaggctgaggcaggaagaatggcgtgaaccctggaggcggagcttgcagtgagccgagatggcgccactgcactgcagcctgggtgacagagtgagactgcatctcaaaaaaaaaaaaaaaaagaaattagccgggcttggtggcgggcacctgtaatcccagctactcgagaggctgaggcaaaagaatcgcttgaacccaggaggcagagattgcagtgagctaagattgcgccactgcactctggcctgggtgacagactgagactccatctcaaaaatcatcatcatcatcataataaattgatggccaggcacggtggctcacgcctataatcccagcactttgggaggccgaggcaggtggatcgtgaggtcaagcgatagagaccatcctggccaacatggtaaaaccccttctctactaaaataacaaaaaaaaaaaaattagctgagtgtgatgacacacaactgtagtcctagctactcgggaggctgagacaggacaattgcttgaacccaggaggcagaggttgcagtgagccaagatcatgcctctgcactccagcttggtgacagagcaagactcggtcttaataataataataataattgattacattgtacctgctctagaaaagaaaaaagaaaaaaaaatcattgatgatagtctcttaggctgggggtggtggctcgtgcctgtaacctcaacactgggagaccaaggtggaaggatcgtttgagatcagcctagtgggaccttgtctctacaaaaaataaaaaataataaaattaggctcagtgcagtggctcatgactgtaatcccagcactttgggaggataagatgggcggatcacttgagcgtaggagtttgagaccagcctgggcattatattgagaccttgtctctacaaaaataaaaataaaaaattaggcaggcatagtggcacatgcctgtgattccagctgcttgggaggctgaggtgagagaattgtttgagtctgggaggtcgaggctgcagtgattactgcagtacactgaatgcgtcactgtactccagcctatagatatacatgtgtgtatatatatatgtaggggtgacgcttgtgaattcttttttaattttattatttttattttctttttgagatagagtcttgctctgtcacactggctggagtgcagtggcacgatctcatctcattacaacctctgcctcctgggttcaagtggttctcctgcctcagccttccaagtagctgggattacaggcatgcgccatgatgcctggcgattttctgtatttttatttcatttatgtatttatttagagatggagttttgctcttgttgcccaggctggagtgcaatggcgtgatctcggctcactgcaacctctgcctcccggattcaaacaattctcctgtcttagactcccgagtagctgggattacaggcatgcgccaccacgcccggataatttttgtatttttagtagaga[134 bp omitted]tggccaagctggtctggaacccctgacctcaggtgacgagcctgccttggcctcccaaagtgctaggattacaggcatgagccaccaagcccagccttaattttattttaagttctggggtacatgtgcaggacatgcaggtttgttacatgggtaaacgtgtgccatggtggtttgctgcacctgttaacccatcacctggtattaagccccgcatccattagctatttatcctgatgctttccctccccaccaccctgcaacaggccccagtgtatgttgttcccctccccgtgtccttgtgttctcattgttcagctcccacttataaatgagaacatgcggtgtttggttggttttctttttttctttttttttttttttagatggagtctcgctctgtcacccaggctggagtgcagtggcacgatctcggctcactgcaagctccacctctcaggttcacaccattctcctgcctcagcctcccgagtagctgggactacaggcgcccaccaccatgcccggttaatttttttttttgtatttttagtagagacagggtttcaccatggtagccaggatggtcttgatctcctgacctcgtgatccacctgcctcagcctcccaaagtgctgggagtacaggtgtgagccaccgcgcccggcttctttatttttttgagagagggtctcactctgtcacccaggctggagtgtagtggtgtgatcttggctcactgcaacctccatttcccagattcaagcaattcttgtgcctcagcctcccgagtaactgagagtacaggtgtgtgccaccatgcctggctcattttcatatttttagtagaaatggggtttcaccatgttggccaggctggtctcgaactccagacctcaagtgatctgcccacctcggcctccgaaagtgctgggattataggcgtgagccactgtgctcagaccggtgtttggttttctgttcctgtgttagtttgctgaggacaaaaaaatatggaatgctttgcgaatttgtgtgtcatcctcgcacaggggccatcctagtcttctctgtatcattccaattttagtatatgtgctgccgaagtgagcacatggattgttttatcaagggaagaaagcttcccagaggcctccaggcaagtttcccttaggatccccttggcctctaacctttccttgagggatcattgacaatgggaaatgagaggatgtggtaatgggtctgctgacgccgtaaaaaactggactttcagtgtcaacgccgatggctgctggataggccacagatcatgtttgccagaatagtcccacagggtgtccctccagcaaattggatcaaggagattaagcaccacacctgaggtcacacagccagccgataaccaaggcagtctgtgaattcgaatctgcaagaggatgtgcctcgtccatccgaatgcctggctttctctacacctccacataacaattataatatgaaaaggtatatgtgggccaggttgggtagctcatgcctatcatcccagcatgttgagaggccgaggcaggtggatcacctgaggtcagcagtttgagaccagcctggccaacatggcaaaactcccatctttactaaaaatacaaaaattagctgggcatggtagtgcacgcctgtagtcccagctactggggaggctgaggcaggacaatcgcttgaacccaggaggcagaggttgcagtgagtcgagatcatgccactgcactccagcctgagcgacagagcgagactctgtctcaagaaaaaaataaaataaagtgtgtgtgtgtgtctgtgtgtgtgtgtgtgtgtgtgtgtgtgtgttggagtgcagtggcatgatctctgctcactgcaacctctgcctcctaggttcaagcgattctcctgcctcagcctctcaagtagatgggattacaggcaccctccaccacgtccagctggtttttttgtatttttagtagagatggggtttcaccatgttggccaggctgctcttgaactcctgacttcaggtgatccgcccaccttggcctcccaaagtgctgggattacgggcatgagccacagtgcctggcctttttttcaagacagtcttgctctgtcacccaggctggagtgtagtggcacaatcacagctcactgcagcctcaacctcccgggctcaggcaatcctcccacctcagcctctggagtagctgggactatactcacatgccacctcacctggttaattttctgtattttctgtacagatgggatctcactgtgttgcccagcctggtctcaagcaatcctcccgcctcagcctcccacagtgctggaattgcaggtgggagtcaccatacccagtctaaactcttccacgtttaatccctccagcaggtgagagtatcgtgcctcactccacacccactagggtcccgtgactacagtcctggctgagggcactgggccacgtctgggtgtagaaaagaccctttgggccaggtagcagactgcaggctggaacaagggtgccagtagaagacagcagctgagctgaggccagggcctaggggacaaagaggcgggggaacggacagcagagtcgggggcaggaggaacagggatcggggcctcgtgggctttgagagaaaaggatgcagcacctaggggtccggcctagagactgggagacgggaaagtaggggaggagctggttggtggggggcagatagtaagttcagtgccggagacatgaaatgctcccccaggttggagaaaccatcagaacactgggggctcggatgactgagtccttcagaataaaatgggctgaggaagcaggattcctgggttaaagccccagagtcacgtcactgaagaagcccgacaatgtgtgttctttggcattttatttcaaaattgcagcaaagacagagaaaaaaaaatcaacggcagcaccaggggtctggcctgagaacggagagatccggaatcggggccaaggtgtatccttgaccgcacgacaaggagtaatgggcggacctgaacccgcgacgaggggctgggggccaagatgcctgggtcggcccttacggctttgggagtgtcgcaaccacatgggggcgccagagacccagacgccgcccgctggccttttatttcgtattgcacttcaggtgagtcattggtagggaggcgagtgctggcgtgacgagatgctacgggtcggtggatctggagcacagcctgcagcttcacaccgggaacatccactcgtgggctctgattccgtactgcggaacaacggaggcagtgcgtgaggtggaagctgcactacaactcccagtaggccctggggtgttccaggccgagtgcctacggagctgtgccccagcggctcacgggaaatgtagtccacttcccagagggccccaacaatgatgggaacggggaatcaaggctaaggcggcgcagaggcttccgggagatgtagttctgaagacaggaattatggccaggcctctaaggctcttggaaaaagtcactttcagctcagaaagcccagatagtcagaggatgtgtagttctaggtcctgatgcacaaaagtttacagaaatgtagctctaggtctgggaaaggagcccagagattcttgggaaagagatcttggcccagaagatgggaatacccccagagatttatgggattaaacagtctggtgccagagaggggccaaggtccagaggctcatgggaggaagctttctccggccaaagggatagcccagggctccagggaatcttgggaggccaacctctgagatggccagagggctggctaaggtctcagtgattcatggaaagggcctttctcccaccagggcacccggggcagcagaggatcacagggagggagtttctcccaccagggcacccaggggcctcagaggcccacggagagggggtttctcctaccagggcacccaggagccgcagaggatcacaggaaggggtttccaaagctgaagacatatccagggctccgggagctcccaggaaagggtgatttagccccaaggggttttccaggccacagagcagcacagaaagcccactctccagggcctcaataagaaaggccattatctgttcctggtactactgaaggaggctggctgttagtccaggggctcatgggacaccaacttctccagggaacaagctcccagcccattccccagctccctgcagctcacctggatctccttcagctccttctggaagcggaggatcagctcaggcccattttccatggtgggaatgtggaggttctgggacagaaggtgcggtgaggaccaagcccctcccctccttccctcccacccacaatggcagccccgcctcaccctgtctttgtacaggattcggtgcactgggcagacctggcaagcggtgcccgagccaaagacttcccgcacgcggccctcctccagggcccgcagcaactgcttcatggtgatcgtgcgctccaccacccggaactcaccctgcagggcagttggcagagacacgtgtccccagagggttgccctgctgcagacctccacctctccctccctgaggatagtgagaaagacagaggcccaacgggagagacagacccaggagaaggggcagagacatgccagtgtgccccagtcccagccctctgatgccctggcccctggcacatggcgcccatcaccagaagatgccatgtcctcacccaggtctgagccatgtccagtagactctgtctgaccactccaggcaggataacaccattcagcgggggcgtcaccagctccagcactagggcaggtgtaaggggtggaagatgttacctctcaccccctagcaccgccgtcttaagagccacccccttcccccatcccagaatccctggggcctgtaacctgccaggaatgatggtgccacccacttccaccagggttcgggctgggtcatgggtgggcttacccccatcttcgtgggtccagtagacaaagatgttcatggttcccacctcggtgagctggtggtcgggcccatacagccagaggacctgttcacagccccgcttgagtgcctcctgttgcactaacacggtgggcccataattcctggtggagggcagtctggttgggtggggcaagggagccccatccttccccagcccagccccagaggaggctcatcctactctctcccgtctccctgctcacagctctcacagggctccccagttcccctgagatggaatccttgacttttcatttggcatcaggaccctaaatggttatgtcccctctctcctgtctcttcccacttttctttcttttcttttcttttttttttaagacggagtctcgctctgtcacccaggctggagtgcagtggtgcgatcttggctcactgcaacctccgcctcccaggttca[139 bp omitted]aaccatttctttttttctttttttcttttttttttttttgagacagagtcttgctctgtcgcccaggctgaggctagagtgcagtggtgcgatctcagctcactgcaacctccgcctctcgggtccaagcgattctcgtgcctcagcctcctgagtaactggagtaactggggcatgcagcaccatgtccggctaatttatattcacatttatatttatatgcccgcctcagccccccaaagtgctgggattacaagagtgagccacagcgcccggccttactttttatatttttagtagagacggggtttcaccatgttggccaggctggtctcaaactcctgacctcaagtgatccgcctacctcggcctcccaaagtgctgggattacaagcgtgagctaccgcgcctggctccaaaaccgtttctgttgtcacctcctcgagaggtgtttccagacctccaggctgggtgctggaccttccctggactcccccagtgaactgggctacctggatgactttctgagtctctctcccagagatagcctctcccctcagctgctaacaagcctcccatggctccccagtgccccaggacaagaccctagcctccttccggcattccaggcctgcctgggtctaatgaatacttgctaagcatttttcaaaacccaaacttatttttgtaacctgaacatcttctgtgatcctattccttctgtccctgtacacatggttcccaggactggaaacagtttgctgacttttgtacccaggaaaccccctcctccctcctcgtcagacctagttga[139 bp omitted]gcctcctgagtagctgcgactacaggcgcccgccaccaagcccggctaatttt[182 bp omitted]aacatgcagctccgaatactggggctcccaccagcctgggagacccaggagagcagggctcggggctgactcatctgtgtccccagcttctgccagcacagggcctggccctcaggagacctcacaggatgtggctgaaaggacctgaatgcacccccagctggggccacattcctgtcccaacacgccagtgcccaccctctgccttggttgcccaggagacccagctgtctccttcctgccctgctgagctgaggccactgggagacagatttacacagaaagtccacacgggggtgaggggctttggaggctcaaacgactgtgggagctgggtatggggagcgcagcccagcctgggggatcaggggaggcttctggggcgagaagccaatgagctgagtgtaagcttcactcctggaggcttccagggaccagtcctggtttccccactgacctccacccaatgccttcccatctgtgagcctttttgtccatctgaaaaataatcccctcctccttccttccatggtttgttttcagggaccagggaggtcacttagcactgagccctgcacggtgctgatgatgtcaccttcatgtgacatccagaggcatggccgaaagcacgcacgctggtccctgtgtctccaacgcccagtgcgccagtcgttctggggatgggggtgctacttacccacctaacttgtagttgccgaccccgcccacccaggcccggatgaaggctgggtcggccaggagggagaccggggtcacggagcctccagggaagtaggcacccactgggcagagaatgacgaacaggagcgcgcgcgtgggctggctgacacccagcgagggctgcgacgggcaaagggacagcgtcaggagtccaggcccccagtcccttcccgtccccaggcccaggcctccaggaccccacccctgccctgcagaatccaacccccgcagcccagcttcccagccctggagttgggcccacctcgttcccaatgagcacaggccgcacatagaggctggtgccggcggcatcggggacccagtccttgtccacttcgatgagccggcggatgcactccagcaactccagcttgtcgaaactctgggtgggattctgaatgagtcaaggggcccttgctgccccggccccagccctcctccccaccccggtggaccgggacccctcaccggcaggcacaggcgcatggctgagcgcagcatccggtccatgttgagccaggggcggaagaggcgcacctgctggtctttgcctttgaacgccttcatgccctcaaacagctgcggggacacgcgggtggggaggctcagagacttctccagacagtcatgagagacaccaagacagacagagacagatacacaaagacacagacaactgaaagatggaggccaagaggagagcaccggggagatttagcagctgggtcagagagatggagaaaaagagagacagatatagacagggagacaaacaggtagag[131 bp omitted]aagaccccatctctaccaaaaaatacgaaaattagccagacgtggtagcacgtgactggagtcccaggtatttggaaggtggtgggaggatcacttgagcctgggagtttgagactgcagtgagccacgatcatgccactgcactccagcctgggacctagttttttttttctggagactctgtccctgatcactgccccatggttccaagtttgcttgttcagcatctgctccactgcagagtggaagagcctggaaggcagggattacccttgacacgtttaccagacagcctctcctgcagtcccatgcaccagggtaggcagcgcttggcacagagtgtttttttgttttgttttgttttgttttgttttgagacagggtctcactctgtcacccaggctggagtgcagtggcgtgatctctgctgattgcaacctccgcctcccaggtccaagtgattcttgtgcctcggcctcctgggtagctgggattacaggcgcccaccaccacgcccagctaatttttgtatttttagttgatccacccgcctcagcctcccaaagtgctaggattacaggggtgagccactgcacccagccagactttttttttttttcccatagtgggtttttgatgaatgaatagataaatgaatggaagacaagcaaaactagctacaatattttggggggataaaaaccaccaccacaaaaatgaggggcaagatggggcaggggcagggagtagccatatcaggtagtaaaacattataaatctacaatacttaaaacagagtgacactgctatatgagtggacagactgaataatggaatagataaccaaatatccatctagagaaaaactacgttgaatctctatttcacacctcacaccagaaaaaattccaggtgcattaaaagtctaaacaaaatatatatatatatattacaccataaaagctatagaaggaaacaaaaataactgttttatatcttggattgggaattttattttttattttatttgagatggagtctcactctgttgcccaggctgaagtgctctatcttggctcactgcaacctctacctcccaggttcaagcaattcttttgcctcaacctcccaagtagctgggattacaggtgcctacaaccacgcccggctaatttttgtgtttttggtagagacggggtttca[142 bp omitted]ctatgttgcccaggctggtcttgaactcctgagctcaagcaatccccctgcctcttcttcccagccccagatgaattttttaaaacctaacctgatagaaaaatcagcctagcaaatggacagttcacacaaaaggaaatacaggtggcccttaagctcgtgagaagatagtcaatttcattaatcactagggagaaaaatgcaaattaaaattagtttgagatacctttaaaaccacatgggagattggaaaagatctaaaacttggacaagggttgtccaaggtatggaaacaggctctgctggtgggtgtggaaactgacacaccctgtagatgtagatgtggcgatacgtatcaagattacaagcatacatatcctttgacctacagttcccgaaattgagcctctagatacatttgcacttaaacaagtgactaaagaagggacgtgtgtactggattccttttttttttttttttttttttttgagatggagtctcactctgccacccaggctggagtgcagtggcgcaatctcggctcactgcaacctccgcctcccgggttcaagcaattctcctgcctcagcctcccgagtacctgggattacaggcacccgccaccacacccagctaatttttgtatatttagtagagatggggtttcaccatgttggcaaagctggtcttgaactcctgacctcaggtgacccacctgcctcagcctcccaaagtgctgggattgcaggtgagccatcacagccggccctgtactagattctttattgcaaaattgtttataatagactggaaacaacctaagtgtccaacagtaggggattgcctaaggaggtgcattgttaggatgatacagcatgaggctgcaagaaagatggaaaaagctctttaagctttaaggtatagagaagaatttccaggcccagtatgatggctcatacctgtaaccccagaactgggaggctaaggtgggagaattgcttgaagccaggagttcgagaccagcctgggcaacaaagtgagatcctgtctttgcacaagatttaaaaattaactgggcaaggtggtgtgtgcctgtagtcctagccactcgggaggcagaggcaggaggatcacttgagcctaggaggcggaggttgcagtgagctgagaccatgccactgcactccagcctgggaaacagagcaagacaccgtctcaaaaacaaaacaaaacaaaacccaggtaaaagagcccggatacaccggatatagtggctcatgcctgcaatcccaggactttgggaggctgaggcaggaggatcacttgagcttagaaatctgagatcaccctgggcaacataacaagaccccatccctaaaaaaaaataaaataaaataaaaattagctgggcatggtggtgcacacctgcagtcccagctacttggaaggctgacgcaggtggatcgctggagcctgggaggtcaaggctgcagtgagccaagatcgtgccactgcactccagcctgggctacagagcaagaccctttctcaaa[135 bp omitted]ggtgaaaccccatccctattatttaaagataataaataaacaaatacaggtagacaaagacagaaagcagactaatggttgtcatgggctggggtgagggacaatgggtactgattaataggtatgggggattaaacagttctgaaccttgatggtgctgatggttgcataacattgcctgccactgaattatgggctttaaaatggttggaggctgggcgccgtggctcacgccagtaatcccagccctttgggaggatgaggcggtggatcatctgaggtcgggagtttgagaccagcctggccaacgtggtgaaaccgtgtctctactaaatatacaaaaattagccaatagtggtgcatgtctataatcccagctactcaggaggctgaggcaggagaatcacttgaacctgggaggcagaggttgcagtgagccaagattgtgccactgcactccagcctgggcaacaagagtgaaactctatctcataaataaataaacaaacaaacaaacaaataaaatggttggaatcccacatttgatgctgtgtgttattatgtatgcgtattagtaccacaataataaaaaataaggccaggcatggtggctcacgcctgcaatcccagcactttgggaggctgaggtgggcagatcacttgaggccaggagttcgaaaacagcctggccaacatggtgaaaccctggctttactaaaaatacaaaaattagccgggtgtggtggcgggcgcctgtaatcccagctactggggaggctgaggcaggagaatcacttgaacccgggaggcggaggttgcagtgagcgagattgtatcattgcactccaacctgggggacagagtgagactctgtctctaaataaataaataagaaaaaataaaataaaaaataatacacgtggtcggcctgcaatccacacatgccctggagtgtgggtgacatagggacagcattgtcctactccctcatcctcccccttccgccccctggacccgcgggatcacagcagtgcgttctgtctgccagggccacaggcttcctctgctctcactcagctgaagaaaaagtactgggtccccagccagaggacaactgctgtgctgggctgaagggagaagtgtgtggtggtctccaagtaaccagcttcctgggggctcagcaggcggaatcctgcccatcacgcttatgtactggcaggagtgtctggctgtgattggaggtgtgtgtgctctgtacagaatcgactggtgttgcttagatgtccagagtgggaggggagaggggaaaaaacaaaaccttaaaattctggaaaggaaggaagaaaggaaaaaacagagggagggagggaaaggaaagaaaggaatggaataaaagtcttcatgccacagaactgtgccctggaggactaaaatcagccaacctgctaaccagttactggagctgtaagatgctcacttaaatcttgtctcaaccaaagtttccttctgaagaccttgctttcagccgcagctataagtcctaaaaccaaatgcctcctggatctgtctcctagaaacttcacagtatctcaggctcaccaggtgccacaaagccgctcctcctcctgggtccccatgtggggacaggcccaaggtctacctggtcaccagcccggcttcctagcctgcaactcttgccctccacatggcctgagagggctcttactatacccagacatggccctgcccctcccttcctcagagccctcagtggctcccagcacccttggacaaggccccagcccctcagctcctccatggccctgacattttcagcctccttaaccatgctccaacaccgcaatttctcccaaatgtaccaggctctactcccgtttggggtttggattggctgtctccactcctgccatcccccaccgactgtcccccttcccgccatctccaactgtcccctctcccgccatcccccctgggctgtctcctctcctgccatccctcccccggctggccctctcccaccatcacttccccggctgtccctctcccgccatccctcccccggctgtccctctcctgccatccctcccccggctgtccgtctcccgccatccctcccccggctgtccgtctcccgccatccctcccctggctgtcccctctcccaccatgcctcccctggctgtcccctctcccgccatccctcccctggctgtcccctctcccgccatccctcccctggctgtcccctctcccgccatccctcccctggctgtcccctctcccgccatccctcccctgactgtcccctctcccgccatccctcccctggctgtcccctctccagccatccccctggctgtgccctcccccaccatctccccccccaatggctgtcccctctcccgcgatcatcctggctgtccctctcccgccagccccccggctgtcccctttcctaccatcaccctgtcacctctcccaccatccccctctaagcttccctctatgccagaagaagccatgctttctttcaagtgaggctgggggtctctactggcctccacagggcctccatcagagcacagatcatactgagttatgcccacagcatggggttttccaagtgaaggaaccgggtctgctcatctcggggaacccagcatcaccaagcatgagcctggagcatggaaggcctcagaaaacaaatggtgaatgcacagaaaggagaaacacacaacaaacaaaccaagagaggtacacctggcaagagacacagcaaggaggaggagatgcagacagggacagggagagaggccggccgccatgccacctgcagggagtagtggaggctggaggaggctgggtgcagcgtgaggttctggaagggctggattcggggctggccccagcccttgtcattccattccaccatcagcatgtggtcggtaaatgtcttcccaaacaccaggggctcgccggggccaggcttcttatgaggcttctgtgtcatttccagctgcaggtctgcagcctgaggaaagacaggggtatcctagaatctggccacaacctcccagctgaaaaactacaactcccatgaagccctgggcctcagacccatagagaagaaggacctgtcaccctggaggattctgggacatgcagtttcatcccttgtctgcggcccaatggcaggctgttaagctaccaccactcactgccatctctgggctgtggaccttttggagatgcccaaaaccagctgccagccccctcctctctcagagccaagcatcgagttccctcctttcaccttgaaactggaggaggcatatcttctgggaccacacagaagccaagggacagagagaagctttcgtgcccagatctgggtggagaaagaagtgagagagggggtgagtggggcacagcaggggccctggcagctcgctcgccacctcctgcacttggaggtcccactggcctgcctgttctgtcccagtttcagtccattctagacggggcaggtggtcctgaaggaggccaagtcccctccctgccctgacgagggctcgctggaaagagctgagtcagctcccgccccctcctccatgctgcggcaaagtcaaacgcaagcgcctcccaccccagagacctttggtcgcagcctggagatcagctcagacaagaaaacaaccagggaaggcacacaggtaagtgaaggcctccgggtacccaagtgctgacaggccttagaagaccaaggaccgacaggtcctgctcccccagagctcaggggtgcagaccccaggcccgcctccctcagacctaagtaagagtccagactctagctgcctcctccctcagacccgaagtctgggcccccagcccctcctccctcagaccctggagtccaggcctcagaccctcctcccttacatccaggagtacaggccccacccctcctccctcagacccaggagtccagttccccagcccctcctccgccagacccaggagtacaggtgcttattctctgaaggtattcgatcaactgggctctgattacctgaaatacaaacccattttggcagtgactccaattcccttcagcccctggggctgaggggcagctacaggggcctggggagccactgcagtcctcactgcatgaggctcaggcgggtcctcccagaggggagtaggaagagcaggtctggctgtgtccagcaggctgggccctctctggtgacctttgacctcacaaggcctctttccccagccctgtggggaggcgttggggcgtgaggttgagagagacagagtggcctggcctggcctgccctgtgagctgggtgagttggcactgattctggaagatggacgtgaatgggcgtggtcacttgtcgctaggtgagttgctgggagatgggcctgcagcgtggtcttgctggtgtgaggctccagggattccggggtgatcagagcgtgggtccccagattgcctttgggtggcgacatctagactgctcagccttgcagccatgcttctgcccagagggataggacacccacagtatgagagacacaaacacagtgcgacagccagcctgtgggcaggagagctgccctcagagccaagatgaaaaaaagagagtaagagatggaagaggaaggatgagaaaaagaaacacagaaaggggcgcacaaacagaaaaaaaaaaaaacaaaaacagaaattgacgccaagaaacaagagatgccaaaatagatctaatcatagaaagaggccacacgcagtggctcgcgcctgtaatcccagcactgtgggaggccgaggcaggaggatagcttgaggccaggtgttcaagaccagcctgggcaacatagggagaccctgtctctacagaaaatacaagttagctgggtgtggtggcgggcgcctgtagtcccagcaacttgggaagctgaggcaggagaattgcttaaacccaggaggcggaggttgcagtgagccgagatggtgccactgcactccagcctgggcgacagagcaagactctctgtctcaattaaaaagaaaaaaaacaaagaaagaaagtaggcagctggctcagtagctcatgcctgtaatcacagcactttaggagacagaggtgggaggactgcatgaggccaggagttcaagatcagcctgggcaatatagcaagaccctgtctctacaaacaatttaaaaattagccaggtatggtggcacacacctgtaattccagttactcagaaggctaaggtgggaggatcaccttgacctactggtcaaggctgtggtgagctacgatcacactgctacactccagcatgagtgatagagtgtctctcaaaaaaaaaaaaaaaaaaaaaaaaaaaaaagaccagcatggtggctcatgcctgtaatctgaggcaggtggatcgcttgagcccatctactcgggaggctgaggcaccacagtcacttgaacccatgaggcggaggttacagtgagccgagatcgtgccacggcactccagcctgagcaacagagcaagactcggtcaaaaagaaaagacgagacaaagaaataaagtacgtttgggggttcacagggcaggtctctataatgtgatagaacctccattatgtcccatacagcccaggagtatcaccatcaaagaccaggagtgtcactgtcaaagcccagcagtgccctccatactccaggactgtccccatatcacggccccggagagaccccatcataccgcagtctgcccttgtcacagcccacacatgaccccatcacgtctagaactgccccctttatagcccaggactctcccccatcacagaccagggctgttctatgatggcccaagatgctccacatcacaagtccagattgtgcctgtaacttatcagaactggtccccagcagagccaagtactgtcccaaacagctcaggaatgtcccctatccaaagcccagcacttttccccattataaccagcattgtctctgccaaatatcagggcttatttcctattcaccaggtctgaaattaaaaaaaaaaaaaaaatcccattgttgtctttttcaatccccaggactatccctatgttgctgtctaggccagtaccttccagactgtccctaccatggtccagcactgtcctctccacaccccgggactgtccccatcacagctgaggactcagcccaattatctccattacaggatatctctatcttcatcagagcctaggaatgtcccatcatgagttcagggccattctatgacaccagaactgtgccatgatgagacggtccacatcagtcccaagtggacctgtcaaagcccagtactgccccaccacagtccaggagtgtcaccactaaagcccagattgcccacataccccaggtatcccaggactatccctatcagtcactaagagccgaaaaaagtgaaattctgccctgacattcatcagctaggataagagactcaaataaagtcaggtgtaaagttaacagacagttctcccaaggttacaccgcagctgtgaaggcttgtaatgacccctttctttggctgtttccttcctcactgagaaaccttgttctctgaaatcatagactctgggaaacgctgctgctgtttgacatcgcacagtcagaagggatcgtctcagccagcctgcagcatctgtcactttgaccatgagacgctgcctcgatttccaatccaggtgcaaagcttcagataggagtttgggaagcacagcaatccccatctcttatttttttcaactttcattccaagaaaataggaccttgagtccaattcccagagctgagacttgaggtccaactctgccttcacctgcacccggccctggaggtctgggcccctttattccagctcccgcacaggctgatgccccaccgcaccccagggctccgctccccaaatcacaacctccccacccccacgcctccctcattacagggtcctccaccatgtttccctttttttttttttttttacctccccgccaattacttgccccacctcatccgcgtctacctgctccccctcaccccattaaagcctcgtgctcctttccaaagggcgccatcctcctccgcgccctgcagcggaaccccagggcgggaggagcggcgccgagtcggaccggctgcaggccagtggtcttcccggaagtgcgcctcccccggttatttcccagaccccggcgcggggctgcgaacccacctgccccagagcggctgcggccatgatccgtgcggcgcgtaactgtgcccgcccggggcgcggctccgaagagagacgttccggccacgccccgctcacgcctccttctgggggaaggcggccgaccagcgccccaggccgtcccagctccagggcgtcggcagggagccggacactgctgcggggcgcaggcgctggtgggagggcaggacttgaaatacggtccctgccaggcgaagtggctcaggtctgtaatcttagcactttgggaggccgaagc[132 bp omitted]gaggcaggagaattgcttgaatcggggaggcagaggttgcagtgagccgagatgatgccactgcactccagcctgggcgacagagtgagactccgtctcaaaaaaaaaaaaaaaaaaaagtcctggcttggtggctcacacctgtaatcccagcactttgggggccaaggcgggtggatcacctgaggccaggagttcaagaccagcctggccgacatgggga[134 bp omitted]aaaccccgtctctactaaagatacaaaaattagccgggtgtggtggtgtgcgcctgtaatcccagctactagggaggctgaggcaggagaatcatttgaaccctggaggcggacgttgcggtgagccgagatcgcgccactgcatttccagcctgggtgacagggtgagactccgtctcaaaataaataaataaataaaaataaatacataaaaatacaaaaattagtcgagcgtggtgccgggggcctgtaatcccagctattcgggaggctgaggcaggagaatcgcttgaacccgggaggcggaggttgcagtgagccgacattgcaccacagcactccagcctgggcgacagagtgagactccgtctcaaattaaaaaaaaaaaaaaaaaatcgtatccctcggccatcgtgtctcggcaatcctaccctgggacactctgtctccaaattctacccccacagtgcccccaagtcctgtccccgggtcactatcctgccacccctaacagccacaggcccaaacagccaaaccgcgggacccttccctcacagggcgtcgccctgtttttctgcgctccgccccagtcctcctgccccacccgccagccccgggctgtagggtcggggcccactgacagctcccgcccccgccgcggccaatcagcggttggtgcacacgcccccccggccacagccaatccgcagcagccctgcagctccacccctcacctgggggacgccagcgcacccgggccctgccccccccctgggtccagctggggagtctgcgtcccccagtgccctgcggaccaaaacccaggagtttcagcccctcctccctctgatccagatgtctcaaccccctactttctcttccctttggacttttcttgccagccaccttcctattctacaggcagtgagaggaaaactccttttccctgagggccaagagtaagagggccttctgcgtctccccctccattacctcctaattagcgcttaatttactctcccctgcgggcctttagttagcgcgctggtgaagccaaaccgctctacccttcccaggagcccctggcgacagcgacagggctagcaacatcaggcacctgcttgctgcaaggcctggggttggggggcggggggagctgcagtccttcagggtcgaggcaacttgtgggtctggggtgcaagggctaagtggggcagaaggactcgtctaaaggatgggaaataaatataacgatatcctcctccttctggctgcaaatcgtttttatgggaacctgcagggtgacccggcaccttgctaactgggcttagagtctaagggcttgggggctgcatctgatacaggttggagtttggggtgggagagtcctaggaagggggccccaagtagaaatgagagaaatcaggaagggatatcgggggcgtccacgggggtgctccgactggccttgcacccgtaccccagctctgcaccccccgtcacgagcagttcaatgcccgtgcagaagttggcttcggaggccaggaacactgccgcagccccgacctcagcgggctggcccatgcggcccagtggctggggagaaaagaggggggaaggaggtcaagaggagccccacttgatcgccatgccccccacccccatgccaccttctaccacctggatctgaaccccacttctacctgggccagcatgccctctcggattgtggccctagggtctggcattaaggctgccagctcctcccacagcggggtccagatgtttcctggggagatactagaggaagggagaggggggatcaaagcaatctgtctcgaaccacttgggatcactcccagtcaccccagtccccccaggaggctctccgcctgctcagagcagctcaccagttgactcggacaccatatggactttcatccagggccaaagctttggtcatggctgttactgccccctgcaggaaatggagcggggaagaaagttcagtccccgggacatggggtccctgccatccattgtctcctgccagccaggggggcatcagaatggggaagtcatgccctccttgaaggctgccttcagaggcaccaggcttggtttcttgggagaaacttggcatagaaatctgtcacaggaaggccaggtgcagtggctcacacctgtaatcccagcactttgggaggccgggatgggtggatcacttgggccaggagttcgagaccagcctggccaacatggcaaaaccccatctctgctaaaaatacaaaaattaaccggacatggtggtgcacgcctgtaatcccagctactggggaggctgaggcgtgagaatcgcttgaacccatgaggcaggggttgcagtgagctgagatcatgccaccacactgcaacctgggtgacagagtgagaccctatctaaaaaaaaaaagaa[132 bp omitted]tgaaatctcgtctctactaaaaaatacaaaaatctagctgggcgtggtgacagccacctgtaatctcagctacttgggaggctgaggcaggagaatcacttgaacccgggaggcggaggttgcagtgagccaagatcacaccattgcactccaacctgggcaataagagcgaaactccatctcaaaaaaaaagaaagaaagaaaagaaaaaacagaaatctgctgggtgcggtggctcatgcctgtaatcccagcactttgggaggccaaggcaggcagatcatgaagtcagaagatcgagaccatcctggctaacatggtgaaaccccgtctctactaaaaaatacaaaaaaaattagctgggtgcggtggcatgcgcctgtagtcccagctactcgggaggctgagtcaggagaatcccttgaacccaggaggcagaggttgcagctgagattgcaccactgaactccagcctggtgacagagcgagactccatctttaaaaaaaaaaaaagaaaagaaaagaaaaaacagaaatctgtcacaggcagttatgcctgggtgctgcatctgggagttaggtgtgagactttctagggccaagatcttgctaggtctggctcctaagttgtctggactcaaagccaaggcccatgggaaggagtagggagggaaggaaggggtaggggctgccataccttggtggccacatagggaactgcctgggcctggccgattgcccccaccaggctggagatgttgatgacattcccttgactcttccgcaggtaggggagggcgagctagggagacaagaggccaagtaagctacacaagccctgcatcttcgcagaccactgaaacacagccacagccatcctgatgtctgggatgacggccacctccctggcatgtttctagttgatctcagtgactgctagagacggcatctaacataacaccctctctggtttgccctggggtcgctgggtctcagcactcaaggagtctctccttggtgggaagggatttctctctcttctcctcggtctctgactctgtctttgtctctacctctgtcccttctcccttggtctttgtatgttactcaaattcctgtccatatcaagacaggaaaatggatgagagatccagaaggctgcatatttttcaaaaatgggatgaagttattttccggtgaagtctctgtggcccaggctggactgcagtggcacgatcatagctcactgcagcctcgaactcctgggctcaagcaatcctccccgctcggcctcccaaagtgttgggattacaggcacgaggcatcacacccagccaggaagttcttttatccatggagggggagatggtttctatgaggccttcatgaaaggcactctagaccaggcacagtgtctcacacctgtaatcccagcactttgggaggctgaggtgggtggatcatctgaggtcagaattttgagaccagcctggccaacatgatgaaaccccatctctactaaaaatacaaaattagccaggcatggtggtgcattcctgtaatctcagctacttgggaggctgaggcaggagaactacttgaacccgggaggtggaggttgcagtgagccaagattgcgctactgcactcgagcctgggcaacagagcaagactccgtttcagaaaaaaaaaaaaaaaaaaaaagaaatgcactgtttcctgccaccgtttctcctgcaattcaactccctggccacctgggaagtccctaaatactctctctgtgtgtgtgcgtgtgtgttcgttgactacacatgaccttggataaactcaaattctatctttgatctcgcttgccttagaaagctgagctggccaggcaaggcctgtccctgccacttaagactaattggtacaaggcagcacccctagcaggctctccgagtgggaatctaaatgagctccctgcccggttccccccaccaactctttcaagccatttctgctcccctcccaaacgacctccacccttttccgtgctgtatcttcgacacaccctgcgtgttcaaacctcagggcctttgaacttgctgttccctctgcctggagtgccttttcctaagagagccacatgacccactcttagggtggccagccatcccagtttgcccaggactgaagggtttttggggacatggtattttcagtccacagtgtcaatgctaaacggggactttcctgggtaaacactccctcagctccctcaaaccctgatccgaggtcacctcctcagtgaggtcttccctggctatactgtttaaagctgcaagccaggatcactagctcacacctgtaatccttgcactttgggaagccgaggagggaggattgcttgaacccaggtgtttgaggccagcatgggcagcttagcaagaccctttttctttctttctttctttctttctttctttctttctttctttcttttctttctctctctctctctctttctttcagatagggtatcactctgttgtctaggctggaatgcagtggtgcaatctcagctcattgcaacctccacttcccaggttcaagcaattctcctgcctcggcttcccgagtagctgggactacaggcatgtgcccccacaccaggataattttttttttttttttttttttttagtggagacagggtttcactatattagccaggctggtctcgaactcctgatctcacatgatctgcctggctcggcctcccaaagtgctgggattccaggcttgagccactgtgcctggcctgtctttattttttttaacaacaaaaaaatattttttgttttattttttgagacagagtctcactctgttgcccaggctggagtgcagtgatgtcatcttggctcactgcaacctcctccccccaggttcaagcccttctcctgcctcagtctcctgagtagctgggactacaggcatgtgtcaccatgcctggctaatttttgtattttttagtagagatggggtttcacc[132 bp omitted]ttcccacacccctgggtccccttccctctttcagatgtcttttctctgtgtcacacactcccttctgacaggccatatatattttacttgtttgttcatgttctgtctctcccaccagcatgcagaaacctatgagggatggtcaagatttcttattttgtttcttccccagcactaaaggtgcctggcacatagcacatgcttcataaatatcctttgaatgaatgaatgggtgaattaatgaatgaatggaggacctggtatgtgtccagccctgtcctcagcaatttacatggattagctcatttcatccctctaacattctcctgtacctacaagaaggaggtacagctgagagtcccatttcacaagcgaggagactaaggaatggagggatgattgacgcccgcagggcatcacgtgacacctgacagcaccagcatttgctgctggacaggctgagacccaaacccataaacaaacaacaatttctcacaattctaagtattaagaactttaggccaggcacagtggctcacacctgtaatcctagaactttgggaggctgaggcgggcagtcacctgaggtcaggagttcaagaccagactggtcaacatggcaaaaccccatctctactaaaaatacaaaaattagccgggtgtggtggtgcgtgcctgtaatcccagctactcgggaggctgaggcaggagaatctcttgatcccgggaggcagaggttgcagtaagccacaatcgcaccactgcactccagcctgggcagcagataaagactgtctcaaaaaaaaagaaaaaagaaaaaagaaaaagagaaaccatgctctaatatgaacgtgaatgatgtgggcattgaccagcctctgccctcctcctcagggaacctctcatcctcgcctcctctcactcccaccagccgtgacaccctccctccctcccagtgcccaccccacctgccttgctccatttctctctcagtctgtgcacctgccctgctgtttaatctcctcccccacctgaccctgcaaacatgagtctcaccagggctgagacacggatcttgccaccctcaccccagcacgaggcacacagctggagctcagtaaatatttgtcccacactccctgagtgtccttctccccacacccctcaaggttgctaagcacctgctctatatcaaggacccgctgggggccaggtgcagtggcaggtacctgtaatgtcagtgctttgggagactgaggtgggaggatcgcttcagtccagaagttcaaggccagcctgggcaacatactgagaccccagttcttaagtgccaaggttctgagacaggagcaggcctgttgtgtttgggagcaatgaggccagtgtggccggaggtgaggtcagagaagaacaggggccagatcacgaggccttgaaggcccccacttctcccttggacaaatgcaatcaactcctttttttgtttgtttgtttcagagacagagtattgctctgtcacccaggcttgagtgcagtggcacgatctcggctcactgcaacctccacctcccaggttcaagcaattcttctgcctcagcctcccgagtagctgggattacgggcgcctaccaccacgcctggctaatttttgtatttttagtagcaacggggtttct[142 bp omitted]cgcttaaccctcagatttgtccctcatacctacaggagccagagcctatgatctgttaataatactaacaggatcacatcactcccttgctcaaatacctgccacagctccctattgctcttgacataaagaccagatgattcagcatgcccttcaaggccctgcctgatctggttcccaccccaatctcttcttgcaacatcccgttctctcactgggcccagctggcagcagcaccaaaccctgtctcgctgccaggccctcgccctgccatctctttctccacctcctccactggtcaatgctgctcagatttcattacttccaggaagtttggctacattccctgaacgggccagcctccaggtcacactctcccagaaccacacccatccccctcataaagcaaaacacactcttctgaactcatgtctctgtttaggaagacctggctgcccaggactgtaaactccccaaggacagagcctacatgtacctggctccctgccctatctccagcacctataacactgccagggccaggtgtggtggctcacgcctgtaatcccagcatctggggaggctgaagtgggaggatcacttgagcccaaggagtttgagaccagtctggacaacatggtgagactccctcgcagccatctcaacaaaaatacaaaaattagccaggcatagtggtgtgcgtttatggtcccaggttttcgggaggctgaggtgggaggattacttgagcctggtaggtcagggcttcaatgaactatgatcacaccatggcactccagcatgggcaacacagcaagacccgatctctaacaaaaaacaaaccgaaaaagaacgttgcctgaggctgggtgcagtggctcccgcctgtaatcccagcattttgggaggccaaggcaggtggatcacctaaggtcaagagttcgagaccagcctgaccaatatggtgaaaccctgtctctgctaaaaatacattagccaggcgtggtggcacatacctgtaatcccagctacttgggaggctgagacatgagaactgcttgaacctgggaggtggagattgcagtgagccgagattgcaccactgcactccagcctgggtgaaagagtgagacaccatctccaaaataaaagaatgttgcctggcttggtcagtacttgactaaatagaggactgaatggatagattttttttttttttgagatggagtctcgctctgtcttgcccaggctggagtgcagtggcgcaatcttggctcactgctacctccgcctcccaggttcaagcaattctcctgcctcagcctcccgagtagctgggattaccaccatgcccggctaatttttataattttttagtatagacagggtttcggccgggcgcagtggctcacatctgtaatcccagctctcagggaggcagaggcgggaggatagcttgagcccaggagttcgagacctgcctgggcaatatggcgagaccccattctccacaaaaagtaagaaaaaaaaagacaaaaataaaaaaaaataaataagtagagacaggttttcaccatattggccaggctggtctcaaacccctgaccttgtgatctgcctgcttgggcctcccaaaatgctaggattacaggcgtgagccaccccacccagccaggatggatagatttttttttttttttttttgacagagtctcactctgtcacccaggctggagtgcagtggcgcgatctcagcttactgcaacctctgcctcccaggttcactctattctcccatctcagcctcctgagtaggtgggactacaggcgcccgctaccacgcccagctaattttttgtattttttagtagagacggggtttcaccatgttagccaggatggtctcgatctcccgacctcgtgatccacccgccttggcctcccaaagtgctgggattacaggcatgagccaccgcgcctggcctcagaatggatagatctttaaggaacaatccagctctgagagactacaactgaaacccctgtgttcaacaccttctgtggatccctactgcccacaaaatataatttccttgactatctaaatatccttaatcccgcccttgttttccctagcctagggagtcacaaactttggcttgtatcagaatccaccaggaaggccaaagacctggagattctaattcaagggatctgggcaggggccccagaatcaacatttaaagagcttccaaagtcacgtggctgagagagaagagaaaaaaagagagcttctatgggattttgatggtgatggtgatgatggtgatgatagtgataatgatgatgatggtgatgatgataatggtggtcatgatggtgatggtgagtatggtggtgatgaggatggtgatggtgaggatggtgatgaggatgatgataaggatgacggtgaagatgctgatgatcgtagtgatgatgatggtgacggtgatggtgaagatggtgatgatggtgaggatgatgatgataatgatagtgatgatcatgatggtgattttggtaatgatgatggtgatgatgataatggtgatgttggtgaggatggtgacgtggtaatgatggttacgattgtggtaatgatggtgatgattgtggtaatggtgatgatgatggtgatactggtgaggatggtgatggtggtgatggtgatgattgtggtgatgatggtgatgattgtggtaacaatggtgatggtgatgatggtggtgatgatggtggcaatgatggtgatgctgatgttgatggtgatggtgatgattgtggtaatgacagtgttgatggtgatgatggtggtaatgatggtgatgatgatgatggtgaggttggggatggtaatgatggtggtgatgttggtgatggtaaattttagtaatgacggtggtgatgatgatgaggatggtgatggtggtgatggtgatgattgtggcaatgatggtgatggtgatgatggtggtgatgatggtggcaatgatggtgatgctgatgttgttgatggtgatggtgatgattgtggtaatgatggtggtgatgatggtgatggtaattgtagtgatggtggtgatgatggtgaggatggtgatgacggtggtaatggtgatggtgatgattgtggtaatgacgatggtgatggtgatgactgtggtaatgatggtggtgatgttggtgatggtaaattttagtaatgacagtggtgatgatgatgaggatggtgatggtgatgattgtggtaatgatgatggtggtgatggtgatgatgattgtggtaatgatggtgatgatgatggtggtgatgatggtggcaatgatggtgatgctgtcattgatggtgatgctgtcattgatggtgatggtgatgattgtggtaatgacagtgttgatggtgatgatggtggtaatgatggtgacgatgatgatggtgaggttggggatggtaatgatggtggtgaagatggtgttgatggtgatggtggtgatggtgaaaatggtgatggtgaggatgacggtgagaatgatggtgagggtggtaacaatggtaatgatggtgatggaaataacgatggtgataatggcagcgacacaagtgttcacaagattcctttgcaacaagtgcatgaacaagcagacaaaagtctttgccctcagggaaaacaaaggcaatatgcaaatgttgtcgggatcctggtgtgaacaaatcagctgtaataaaacatttgggaacttctgggtgtatttaaatagagttaaatatgagatggtatcaagacatttctgttaattgtattaggtgatataatggtatttttgttatgtaaaaaaggcctgagcctggacaaaatggtgagactctgtctctacaaaaaaataaaagattggctgggcgtggtggtgcatgtctgttgtcccagcaacctgagaggctgaggtaggaggatcacttgagcctaggaagtcgggactgcagtgagccatgatcatttcactgcactccagcctgggtgacagagcaagacactatctcaaaataataataataataatgctttatttttaggagatgcttactaacgtgtttggaaatgaactgtcattgtgtcgtaatatactttataatactttgacaaaaagaaatatatacatttatgtatatacagacacatatatatggtgtacaaaatgtgaattaatgctaatacaaatgatgggcatataggtatttattatactactatatttttcttttcttttttctttctttttttttttgagactgagtcttgctctgttgcccaggctggagtacagtggtgcaatttcagcccactgcaacctccacctccctgggtccaagtgattctcctgcctcagcctcccgagtagctgggattacaggtatgcgccaccctgccccgctaattttttttgtattttcagtagagacgtggtttcaccatgttagccaggctggtcttgaactcctgacctcaggcaatccgcccgcctaggcctcccaaagtgctgggattacaggcatgagccactgcatccggtctat[135 bp omitted]accctgtctctcctaaaaatacaaaaattagccgggcatggtggtacatgtctgtagtccagctacttggtaggctgaggcaggagaatggcttgaacccaggaaggcagaggttgcagtgagccaagatcatgccattgcactccagcctgggcaacatagcaagacctcctctctactgaaactaaaaaaaaaaaaaattagtcgggtgctgtggcatgtatctgtagtcccagctactcggcgggctgagaggatgaggtgggaggatcccttgagcccaagagttcaaggctgcagtgagctgtgatggcaccactgctcaccagctgggaagacaaggaaaggaggaaagaaggaaagaaaaaagggagggagggaggaaggaagaaagagagaaagaaagaaagggccgggcgcagtggctcacacctgtaatcccagcactttgggaggctgaagcaggcggatcacgaggtcaggagattgagatcatcctggccaacatggtgaaaccctgcctctactaaaaaaaaaattagcccggtgtagtggtgcgtgcctgtaatcccagctactcgggaggctgaggcaggagaatagcttgaacccgggaggcagagattgcagtgagctgagatcgtgtcactgcatgccagcctggcgacagagcaagactctaaagaaagacaaaaaaaaaaagaaagaaagaaagaaagaaaagaaaagaacaatggggagtttcagtacacatgaattatctgtactattctaggaatattttgtaagtcttaaattatgtcaaaataaaaataaaaagcattctaatacactggtggtatggtacgcatgaagttcctactgataaaattgtatgatctgggctgggtgcggtggctcacgcctcccagcactttgggaggccgaggcaggcggatcacttgaggtcaggagttccagaccagcctggccaacatgatgaaacctcatctctactaaaaatacaaaaattagccaggtgtggtggcgtgtgcctgtagtcccagctatttgggagggtgaggcaggagaatcacttgaacccagcaggtggaggttgccatgagctgagatggtgccactgcactccagcctgggcgatagagcgagactccgtcgcaaaaaaaaaaaaaaaaaaaattgtatgatctgggtggtggtggggggcaggagtcaacgggtagagcaagttattcttgctttgttttgtttgagacaagttcttactctgttgcccaggctggaatgcagcggcacaatcatagctcactacagcctcaacctcctgggctcaagtgatcctcctcagcctcttgagtagctgcgactacagatgtgtgccaccctatctggctaattttgtttatttttggttgagatggggtctggtgctatgttgcccaggctggtcttgagctcctgagctcaagtgattttcccacctcagcctcccgaagtgctgagattgcagcatgataaatattgataagagtttcatgggtatttaatctaatctcattaaatcctcagaacaactctgtcacaattggccccatttcacaggtgagaaaacagaggagcagaaatgttgcgtaacttgcatgacgttgcaggtaagaagtggcagagaatttaggcaaacaagccacttgttatttctgcctccctgccccgcaggtcctgttgaccaacttgaccaactttatttatttatttattttgagatggagtcttgctctgtcacccaggctggagtgcagtggcgcgatctcggctcactgcaagctccgcctcctgggttcacgccattctcccacctcagcctcccgagtagctgggactacaggcacccgccac[186 bp omitted]tttatgtgaaatctgccttgtgaaatgttggcaatgaatgaaaaaagataggccggacatggtggcttacgcctgtaatccgagcactttgggtggccgaggcaggcagaccgctatagctcaggagtttgagacctgcctgaacaacatagtgagacccccaactctacaaaaaatacaaaaatcagctgggcgtagtggtgggcacctgtagtctcaggtcctcgggaggctgaggcaggagaatttattgagcccaggtagtcaaggttgtggtgagccgagatcctgccactgcactccagcctgggtgatggagcaagattgtctcaaaaaaaaaaaaaaaaaaagtaaaagaaaagaagaaaatatatatatatatacacacacacacacacacacacacacacacacatatattaactcttcatgggctgaggtgtaggtgtgttttatgtgtggaggtgtttttagtgttgggttaatcctagaaagtcaacacaaatttggaacaggagccagggttcactggttaagcaggggattgcccaacctcccgggaacatttcacctggatcttggatgcgacctcagagtcagcacctgaagctccctggacactgggcccgcccccaggcctctcccctctttgcctactcttgctcccctgagttcctccagcctcaaactggtcagctgcaagctggtatctccagagccccacctccacgatctcatgcccaatgcccattcccaccaggacgtccaccaggcagttcatgttcaacagcgcccccgccaggctttcctgccacagtgaatggcagctctgtccggtcagttgctcagttgctgg[136 bp omitted]ctgcctcagcctcataagaagctgggattacaggcgcccaccaccacgcctggctaatttttgtatttttagtagagacggagtttcaccatgttggccaggctggtctcgaactcctgacctcatgatctgcccgccttagcctcccaaagtgctgggattacaaagacatgagccaccgtgcctggcaaggacagggattttcttctgttgtgtgttcatagctgtatgcgcagggctccgcatgttgctggtgctatataactatttgttgagttaattaattaaaaagtgctatgcggagaataaagatgttatggagagtggatgtttgtgtgcagctgttgcataagcaagggtgagggaaaggctttgatgtgtgttcttctccttcgtttttttttagatagagtcttgctctgttgcccaggctggagtgcagtggtgcaatctcagctcactgcaacctccatctcccaggttccagcaattctcctgcctcagcctcacgaggaattgggattacaggtgctcaccaccatgcccagctaattttttgtgtatttttagtagagacggggtctcaccatattggacaggctggtcttgaactcctgatgagtgatccacccgccttggcatcccaaagtgctgggattacaggtgtgagccaccgtgaccaacccttctccttccttttttttttctttttttttttttgagacggagtctcgctctattgcccaggctggagtgcagtgatgcaatctcggctcactgcaacctccgcctcccgggttcacgccattctcctgcctc[212 bp omitted]gaatcaagagaggcggtgattacaaaagttgttcatcaggaattgtcattggtttacagacatcacattgattagtgattggctatacatgtttgaactatagagtgtgtgacactctagagctacttggtatcaggtcgtctagagtccagaaaccaagtagcctcaaaaggtaattattggatgggtgcagtagctcatgcctgtaatcccagcttgaggcaaggagttcgagaccagcctgagcagcatagaaagaccctgtctctacaaaaaagttaaaaattagtcagtcatagtggtgcacccctgtggtcccagctgctcaggaggctgatacaagaggatcacttgagcccaggggttcgaggctgctgtgagctatgatggtactccagcctgggcaacagagtgagtccctgtctcaaaaagtaattaaaatacatttttataaagtccctctgagccaggtgcggtggctcacacctgtaatcccaggagtttgaaaggctgaggcaggagaatcacttgagcccaagagtttgagaccagcctggacaacatagtgaaaccccacctctattaaaaaataaaaaggccaggcacagtggctcatgcctgtaatcccagcactttgggaggctgaggtgggtggatcacggggtcaggagttcaagaccagcctggccaacatggtgaaacctcgtctctactaaaaatacaaaaaaattagccaggcgtggtggtgagtgcctataatcccagccactagggaggctgaggcagagaattgcttaaacctgggaggcagaggttgcagtgagccgagattgtgccactgtactccagcctgggtgacagagtaagactctgtctcaaaaaataaattaattaatttttaaaaaagttgttaaaaagcccctctgggcctgatcctgatcatctaaaggggctctcctttctcagataaaaaagtttgttttctttctcattccctccccagctctcccccaattcttgtttaagacaaggactcgctctgttgcccaggctggagtgcagtggcacaatcacggctcactgcagcctccagctcccaggttgaagtgatcctctcacctcagcctcccgtgtagctgggattacaggagcaccaccatactcagctaattttttttttttttctgagaaagagtttcactctgtcacccaggctggagtgtagtggcacaatctcagctcactgcaacctccacctcccaggttcaagcaattctaccgcctcagcctcttgagtagctgggattacaggcacctgccaccacgcacagctaatttttgtatttttagtagagatggggtttcaccatgttggactcctgacctcaagtgatctgtccgccttggcctcccaaagtgccaggattacaggcatgagctaccaggcctggcttttttttttttttttttttttgtgagacggagtttccgctcttattgcccaggctggagtgcaatggcacgatctcagctcactgcaacctctgcctcccaggttcaagtgattctcctgcctcagcctcctgagtagctgggattataggcatgtgccaccacacccggctaattttgtatttttaatagagatggggtttc[135 bp omitted]tattttttttttgagacaaggtctcactctgtcacctaggctggagtgcagttgcacgatctcagctcactgcaacctccgcctcctgggctcaagctgtgataccctaaccttgttttaacctgaattgactctcccttaggtgagcgagccagacagactccatcctggctccttcacttgcagccccttaacccaacccccctttcttcaaggacttaacttgtgcaagctgactcccagcacatcaaagaatgcaattactgataagatactgtggcaagttatatccgcagttcccaggcagtcgcccgattaatagtaccctaagcccccgcgtttctgtctggttgatagcgcccaacgtccagcgtctatcaccttgggatgtgtttaaagcccctgcacctggaactgtctgctttcctgtaaccatttatctttctaactttttttgcctgctttacttctgtaagattgttttaactagactcccccctcccctttctaaaccaaagtataaaagaaaatctagccccttcttcggggccgagagaattttgagcgctagccgtctctgggctgccggctaataaaggactcctgatcttgtctcagagtgtggcgtttctctataactcgctcggttacaacaaagcaatcctcccgcctcagcctcccaagtacctgaggcgcaccaccatgctcaggtaatttccgtattttttgtagagacgagggtttc[131 bp omitted]tatttttgagacagcatcttgcaatgttgcccaggctgtatgcagtggtgtgtacatagctcatggcagccttgacttcctgggctcaaacgatcctcccacctcagccacctgagtagctgggactacaagggcaccactacgcctaattttttaaactttttgtagagatggggggtttcgctgtattgccccagctgtcttgaactcctgacctcaagtgaacctcccacaaggacctcccaaagcactgggattaaaggtgtgagccactgtgtctggccccaatatgttcttaacatcccctcctaccaccaccagtctggaaggttctagaaggttcctaagactgggctatgtagctacaaaggtagatttgctggatgtagagattcgcagtcatttatcttccttttggaataaggagattaaactaaataacagaaaatagatggccaggcgtggtgactcaagtctgtaatcccagcactttggaaggccaaggcaggcagatcacttgcagtcagaagcatagctaccaaaaattatgaaatttagctggttttgtggcccgcacctgtaatcccagttactcaggaggctgaggcacgagaatcgcttgaacccaggaggtggaggttgcagtgagctgagatcacaccactgtcctccagcctgggcgacagagagagaccctgtctccaacaaacaaacaaataaaaagaacggaaaacattttgctcttagacaaaatgcatcacacaatccacctatcaggaggctgctcgggcctggcggcagggtcgccagccctcaccttggtcaaggtgtacgtccccagtaggttcagctccagcagctggcggaatccctgggcagaggtctcctcaggcctctgtgggggtgggtctaaagtggggggtgagagagagaggaaaagtgacgggggctggacacagttgcccacgcctgtaatcccagcactttgggaggctgaggcaggcggatcatgaggtcaggagttcaagaccaacctggctgacagggcaaaaccctgtctctacgaaaaatacaaaaattagctgggtgtggtggcgggtgcctatattcccagctactcaggaggctgaggcaggagaattgcttgaacctgggaggtgcaggttgcagtgagcctagatcgagccactgcactccagcctgggcgacagagtgagaccccatctcagaaaaaaaaaaaaaaaaaaagccgggtgcagtggctcatgcctgtaatcccagcatttggggaggccgaggtgggcagatcatctgaggtcaggagttcaagaccagcctggctaacatgatgaaccccatctctactaaaaatataaaaattagcctggcgtgctggtgggcgcctgtaatcccagctacttgggaggctgaggcaggagaatcgcttgaacccaagaggcagaggttgcagtgagctgagatcacaccactgcactccagcctggacgacagagtgcgactccatctgaaaaaaaaagaaaagaaagaagagaagagaagaaaaaagaaaagaaaagaagagagacatggccaagtgagggcacagccctggggacacacaggagggatggaacagggccacagtttcagcacaggcctggggggcttccattgctttactctcctgtccaagtggctagaaagaggtatgaggcaggatgagggaatcaggggcagggagtggggaaactgacgtgcaggaaacagagttggggggcaggaggtggagaatggccctggggtctcacaactcacggtggccagcgttgttgacaacacaatccaggcggccaaatcggcggatggtctcagaaaccagggtctgaggagaaaggaaatgtcctttgttttttttttttggagacggtgtctccctcttgtcactcaggctggagtgcattggcacgatcttggctcactgcaacttcagcctcctgcgttcaagcaactctcctacctcagcctcccaagtagctgggattacaggcgactgccaccacgcccggctaatttttgtactttttagtagagacagggattcactaggttagccaggctggtctcaaactcctgagctcaagtgatccacccgcctcagcctcccaaagtgctggaattacaggtaccacgcccagcccaggaaatgtcctttgaatgagcagtagatggggtgtccagccataaagaagacagggctcccaaatgcaaggcaggagggggaagctgaactcccaggtcaggggacaagagctagaggaagaggggactccgagatcagcagacacagcaggcaagcaggagacaggaaggagacagggggctggtcagagccacactgcagtcgtcacacccagggtcagggggtggggcaggggggtgacaaggattcagagagcgcgtaggggacagttgcccaaggggggcagataacagagagatactgattaaaaggaagaaataggaacccagaaataatggagaaaaaatcagttacatacaggccacgtgcagtggctcacacctgtaatcccaacactttgggaggctgaggtgggcggatcacctgaggtcaggagttcgagaccagcctggccaacatggtgaaaccctgtctctactaaaactacaaaaattagccagacacggtggctcatgcttgtaatcccagcactttgggaggctgaggcgggcggatcatctgaggttgggagttcgagaccagcctgaccaacatggagaaacaccgtctctactaaaaatacaaaattagccaggtgtggtggcacatgcctgaaatctcagctactcgggaggctgagagaggagaatcacttgaagctgggaggcagaggttgcggtgagccgagatcacaccattgcactccagcctgggcaacaggagcgaaactctgtcttaaaaaaaaaaaaaattagccgggcatggtggcgcacacctgtaatcccagctactcgggaggctgagataggagaatggcttgaactcggtaggctgaggttgcagtgagccgagatcacaccactgcactccagcctcagtgacacttacaaaaaaaagagacagaaaaatcagttccagttgacccactttgagggacttattcatttccatccacatgttaaatgtgctaagagccttggagaggtgtgacagaaggaacatgtgacctgcccatcagtcacagaagaccttgtgtgtggagtgacactgggtggaaacctttgacgagtccagcggagccaggagaggaaggaaaagtagagggaaaggcatatgcaaatggctggaggagaacaaagaactggtcattagcggagatgggggtaggaacaggaactcggcttaccttcacatcatcttcctgagtcacatcacagaggataaagacagctccagggagctcctgctccagggcccggcccccagactctgcagggagagaagagctgggagcctggacccctgggtctcagggaggaggggttggggacttggactcctgggtctgagggaggaggtgctgggggcctggactcctgggtctgagggaggaggggctgaggtctggactcctgggtctgaggaagtagggcctgggggcctggactcctgggtctgagggaggaagggctgggagcctggactcctgggtccgaggaagtagggcctgggggcctggactcctgggtctgagggaggaagggctgggagcctggactcctgggtccgaggaagtagggcctgggggcctggactcctgggtctgagggaggaagggctgggagcctggactcctgggtctgagggaggaggggctgggagcctggactcctgggtctgagggaggaggggctgggagcctggactcctgggtctgagggaggaggggctgggggcctggactcctgggtctgagggaggaggggctgaggtctggactcctgggtccgaggaagtagggcctgggggcctggactcctgggtctgagggaggaagggctgggagcctggactcctgggtctgagggaggaggggctgggggcctggactcctgggtctgagggaggaggggctgaggtctggactcctgggtccgaggaagtagggcctgggggcctggactcctgggtctgagggaggaggtgctgggagcctggactcctgggtctgagggaggaggggctgggggcctggactcctgggtctgagggaggaggggctgaggtctggactcctgggtccgaggaagtagggcctgggggcctggactcctgggtctgagggaggaggtgctgggagcctggactcctgggtctgagggaggaggggctgggggcctggactcctgggtctgagggaggaggggatgggggcctggactcctgggtctgagggaggaggggctgggagcctggactcctgggtctgagggaggaggggctgaggtctggactcctgggtctgagaaagtagggcctgggggcctggactcctgggtctgagggaggaggtgccagagcctggactcctgggtctgagggaagaggggctgggagcctggacccctgggtctgaaggaggaggggttggggacttggattcctgggtctgagggaggaggtgccggagcctggacttctgggtctgagggaggaggggctggggacctggactcctgggtctgagggcagaggggctgggggcctggactcctaggtctgagggaggaggggctgaggtctggactcctgggtctgaggaagtagggcctgggggcctggactccggggtctgagggaggaggtgctaggggtctggacctctgggtctgagggaggaagggccaaggtgagggctgagggaccgtcactcaccatccttgtcgcagataaccactcgggccccgctgttcactgagaataggaagggaacaggttactctccgagccttggttaaagcctctgccgccctcttgtggccacctggattggggctgatctccctctcccctcgtgaccccagtctcatgatcacccataggacagagggcagacgccttgacacatactctccttgccttgtttctgctgaggctcctgaacccccgttcgtggcttccggagcaaactccacgactgacagagccattcctcaaaccactggttttgtagctacaccaacagacccagagaaaggggccactgccttcggagaccctgccagactcagccctagcctacagcgccacacgcttactttagcctgcaaattggcttttataatatcagaatcctggctgcagtactggagtccctattttccgcccccatcaccccgcccccatccttcctttctcacactccacagctcccagcagtcagacccggctcaccgaaggcgcgcacgatcccagctccgatgccgcgcccgcccccggtcacgaccaccaccttcccggcatagcgcgttcccgtagccatcccgtgtacgtcggtctctctctctctctactctgggcctctttcacctccaaagccccgtgaggccgtcgcatcaaatcctcaatagaggctggatcctggaagtccggcctcggggggcgttgccaggaaggctagagacctggaagtttgtccccagcccctcctccctcagacactcctctcttcccacagacccaggaatccaggagccccagtccctcctcccacagacccaggaatccagaagcctcagtccctcctccctcagactcgggagtccaggcccccagcccctcctccctcagactcgggagtccagcctcccagcccctcctccctcagacccgggagtccagcctcccagcccctcctccctcagacccaggagtcagggtcccagcccctcctccctcagacccgggagtccagcctcccagtccctcctccctcagacccaggagtcagggtcccaccccttcctccctcagacccgggaatcctggcccagccccctccactctcagaccgagggatcaggttctctatcccttcttcccagagacctataagtccaagccccctgtcccttcctctctcaggacccaggagtccacgactccagctctgcccctcagagacaccagtgccacaaccccagacagacagaaagaaagctattgactaaaagttcaaagttttaatccaaatttagacagtgttgagaaaaccaaactttggccatagaaaccattcccctcccgggcccgcaatggggaccagaccacgccccctgatgccctgagtggtcccagatctccggcggtacctccagaccacgtcctcgcgctccgattggctgccgcttttgggcggattagaagctggattgtagcagagtgactcgcagaggccatgccccctcgtcttgtggcaggaccggaggggcgatcccggcatcccacgcgggcccccagggggtgggacctcctccacgcccactccctcggcgagagaaccccgtggaacccgaattagccaccgggggagatctggggggaggggtctcctggcgcgtggggtccgaaggaggcagcggcacaccgggaagagggtctccctgggagtccaaatttccacctggagaggatgagtgggacatgagaatggcaaacctcagcgctaggaccccggattcccagcccctcctccctcagacccaggactccggattcccagcccctcctccatcagacccaggagtccaggcccccagcccctcctccctcagacccaggagtccaggcccccagcccctcctccctcagatccaggagtctggatacgccagtccagtcctctttgagactcagttgtcggccctctccccgccccctgacctcttcctcccctcctcccaagtgtcccggaccccagtcacctcttgcctgagacctaaaactcccaaaccctgcccaactctttactcaccaagataaaaaattctcaccggcccccagacccctcctctccaggacctgggattccaggtctccagctctctcctccctaaaacccagaagtccaacatccccagccagtcacctgtcatcattctgtgccactgcgacgcctcagtagccagggcttgggagaggctgagaacccgctcccggtgaccttcggaagtcggcaagtaaggggtggtgttccttggactagaaaaaaaaagaagattgggggtgggggtgtgtacatgggggagaggtgggggatggttaattggtacaaaaagaaaaggatgaataagacctactattagatagcacaacagaatgactatagtcaataataatttaattgtacatttttaaataaattaaagggtgtaactagattgtttatacatcaaagggtaaatccttgaaaggggatggataccctattcccgatgatgtgcttatttcacattgcctgcctgtatcaaaacatctcaattatctcgtaaatatatgtatacctagtatgtaccaacaaaaattaaaaattaaaaaaaaaaaaaaaaaagcaggccaggtgcgacagcttatccctgtaatcccagcaccttgggaggccgaggcgggcggatcacttgaggtcaggagttcgagaccaccctggccaacatggtgaaacccagtctctaccaaaaaatacaaaaaagttagccaggcatggtggtgggtgcctgtaattccagctactagggaggctgaggaaggagaatcatttgaacccagaaggcggaggttgcagtgaactgagatcacgccattgcactccagcctgggagacagagcaagactccgtctcaaaaaaaaaaaaaaagtaaaaaataaaaataaaaataaaaaataaacagctggcacagtggggacccgggtaccgcacgtgcctttctgggagttgtagttcctagcacgtgtctctaaaatacgttaaacatggcaccgccctcataccgcccacatgcattacgggatttgtagtccactcgcgcgtcactatcacccaatttccttgatgcagaagtaggatctgctattgaccaagggaatttgaggaactaaagatatcactacggatctagggctttctggttttgttgcagatgccccgggaacttaagcatctctagaagggttgcgatttgtacttccatattcaggagactttaataataatgctactcccctttgcttttgcaaatttttttttcctgctcccttgatacgccctccagttccttacctactccaggacccagagcttctgagccatttctgggctcccgagtgtcctacgacaggctggaaaggaattggggcattagaactcctcacctggaagccccacgttctcattttgagggtgaagtgaagggggctccaaaagagaatgaaattgcccaaaaacactggcaatgttttgttttgtttttcctatgcttctgtaggcactgaatttttaaaaattaatttattttatttattcattttttagaaaggatggagtacagtggtgtgatcataactcactgtagtctcgacttcccaggcttggactaatcctgcttcagcctcctgagtaaatagaactacaggctcgcaccaccatgcctggctaattatttttatttttatttttagtagagacagagtcttgctatgttgcccaggctggtctcttactcctgcctcggcctcccaaagtactggtattacaggggtgagccatagcacccagtgactgacaatgtttaactttacctgtgttcctataaagcagcacatgagttcagaaatcccacctccaccaccaccacctgtgactt[216 bp omitted]aggctaaggcaggagaatcgtttgaacctgggagacaggggtcgcagtgagtcgagattccaccactatactccatcatgggcaacaaagggagactctgtctcaaaaaaagaaaaaaaaaatctaaggggaggttaggtgcagtagctcacacctatattcttagcacctccttccaaggcaggaggatcacttgagctcaggagctcgacaccagcctggccaacgtggtaaaaatctgtctctactaaaaatacaaaaattggctggatgtagtggcatatccctgtagtcctagctactcgggaggctgaggcatgaaaatcacttgaacccaggaggtggaggttgcagtgagtggagatcgcaccactgcactctagcctgggcgaccttgtccctgaaaaaaaaagaaaacatcttttttttttttttttttgagacagagtttcactcttgttgctcaagctggagtgcaatggcaaaatcttagctcaccacaacctccacctcctgggttcaagcgattctcctgcctcagcctcccaaggagctgggattacagacatgtgctaccatgcccagctaattttctatttttagtagagacggggtttctccatgttggtcaggctggtcttgaactcccgacctcaggtgatccgccctccttggcctcccaaattgctgggattacaggcgtgagccaccatgcccggccgaaaaaggaaaacgtctaaggggaaaccatcctgagatatctgagacactctgatgttcagatctgggacgttcttcctattgaaagggcatgaataaaatcaattttcttcctggcttacattttcttttttgctttcttgctattgacaacacatagcaactgagaagaaaaactaggcttccaatccagatgtgtgacccccgcccccacccactgtcctcccctcactgccactcctgtccacccaccactatccaggcgaggaagctgactctagcacaagtacaaactggggtaaattcggaaatccagtttggaggaaggaggtagtgattatctccattttacagaaagggactcaaagtaggcgaagaggacctactaccaccccaccgcccagccccagccctcctcccctcaccctttgctccacgtcaggctggcgtctggctggggacagtgtccttcccagggtgagaagccggggggaggtcgggcgagggaagggccgtccacattcctggtttctgcgcatccgctccagctgctcctgggcactcatccggggccgggccaccggggcctagggaggcgagaaacgtcccaagacccaacctttaggccaggcacagtggctcgtgtaatcccagcacttttgggaggctgagtagagaggatcacttgaggtcaggagttgaagaccagcctggccaacttggcgaaataccatctctactaaaaatacaaaaattagctgggcgtggtggcaggcacctgtaatcctaattactcaggaggctgaggcaggagaattgtttgaaccccagaggtggaggttgcagtgagccgagatcacgccactgcactccagctgcacaacagagcaagactctgtctcaaatatatatatatatatatgttgcttaaacaaggagagagggagaaggccgggtgcagtggtgggtgactgtaatcccagagctttgggaggctgaggtgggaggatcacttgcggccaagagtttgagaccagcctgggcaacatagcaagaccccatctctacaaaaaataaacttgttagatgtggtggtggatgcctgtcagctactcaagaggctgaggcagggggatcacttaagcccaggagttcaaggcttcagggagctatgatcgtgccactgcacctcactctgggtgacagggcaagatcccgtatctaaaagtaaaaagtaaagacagagagagcactcattgctgaagcttccagttaaacatcccagtgagatagcatggatctgtgcttattgtagaaccagtccctgcagtttcctctgctttgaccaatcctgagtcctgtttatataa[135 bp omitted]ccgcctcctgggttcaagcacttctctgcctcggcctctcaagtagctgggattgagtaggtggcacccgccaccacgcccagctaatttttttgtatttttagtacagacagggtt[145 bp omitted]aaagcttggtagcagcacactcagatttctacacatccaattgttttaaacatagtcttaataagcaggtatttttagctatgcagtctgcctgctttgtataccctgaaactgtgcccaacatctgctacccatagataagatgagccccaagcccctgctgctctttggacctctctgatccagagaaacctccacatgctggtggctggcatcacccagaagtaagccccttctccagtccctttctcttgggagctcccttgccttcctcccttcctgtgcagtggtcctcaccctcacacagtaacctctggagggtctcacactgggtgtgactcccccatagacaaatctgtcagtgtccaccaaataaagctcctgtgtgctactgccatctggtggtcatagctttttctttgctaaaccctgaaatccctggaactcactagaccacccctgtgctctggaccttggcagcccctgaaaccacccggttggggtgagggaggagcatgtcccaagataagtgatgttcccagcaggctccaatcatccatgcccatgacacaccactgagaatcaaaaagtgcctctcctctcttcctaggaaaggctcgattgcttttgtatccatgataacaagtaagcacaagaaatgccttcttttttttaaattattttattttattttattttatttttgagatggagtttcactcttattgcccaggctggagtgcaatggcacgatcttggctcactgcaacctctgcctcccaggttcaagcgattctcctgcctcagcctcccgagtagctgggattacaggcatgtgccaccacgcctggctaatttttttgtatttttagtagagacggggttacactatgttggtcaggctggtttcgaactcctgaccttgtgatccgcctaccttggcctcccaaagtgctgggattacaggcgttagccaccgcacgcggtcttttttcttttttttttttaaagacatggtttccctctgttgcccaggatggagtgcagtggtgcaatcatggctcagtgcaggcttgacctcctggactcaagcaatcctcacgtctcaacctcccaagcagctgggaccacaggtgggcaccaccacgcacagctaactttttattttttatttttttattttttgagatggagtcttgctctgtcacccaggctggagtgcagtggcgcagtatcagctcactgcaatctcagccacccaggttcaagcgattctcctgtctcagcctcctaagtagctgggattacaggtgcgtgctgctacacccggctaatttttgtatttttagtagagatgggtttttgccacgttggccagggtgctcttgaactcctgacctcaggtgatccacccgcctcggcatcccaaagtgctgggattacaggtgtgagccactgcacctggccacagctaactttttattatttttttgtagagatgggtcttgctacgttagccaggctgctcttgaacgcctggactcaactgatccacctaccttggcctctcaaagtgttgggattacaggcatgagccaataccactggccaagaaatgccttatttattttattattattattattattattattattattattattattattattattttcgagacagagtctcgctctgttgcccaggctggagtgcaacggtgcaatcttgggtctttgccacctctgcctcctgggttcaagcgattctcctgcctcagcctcccaagtagctgggattacaggcacccgccatcacgctcggataatttttgtatttttgtagagacagggttttc[132 bp omitted]aagtaatcccaacaggtaccccaaagacttctgaaagccagccaatcagtgatggagccaagcttctgaaaatcagccaatcagtgatggtcacatgcttctgagggctggccaatcagtgatggatccgtacttctgaaaatcagccaatcattgatagctccatgcttctgaaaaccagccaatcagcaacagacacagagcacagagcttccacagcttaaagtcaaccaattcctaaacattcctgccactagaagtcaaccagtttct[133 bp omitted]ctgcaacctctgcctcccgagttcaagcgattctcctgcctcagcctcccgagtggctgggattacaggcgcccaccaccacgcctggctaatttttgtactttt[133 bp omitted]ggttctgctattagccccattttagagaagaaaaaatgaaggcacagagaggtttaataactgacccaaagtcacacagcttagaagcgacagagacaaaaatcaatctcaatgctcttaacaagcagtgctctctctgctctgagtatggccttagaacgctctactcctagctgtttcccagaagtgtgggggtccctgatggtcagatgcaaggattacaggatggacctacagcttaccttggttcctagctgtggggaagggaggtggcgaccctcagggctggaagcccgggagaccctcggagacccaagacctggaaagacagaacgggacttggtgaggacgggaatttccgtaaagtcccacccaaccaggatgctcacctaagtgagggctggcgaggtctttgtcgcctccaggaggccgcccccagtcagtctcgggggacctaggggagctcagttccaaggactctggcaggctctgcggggattagaaaagggggataatgatgatcattataataattattattattaccatgttgcaagcatttaggcattggaatacagtctgaataggattcagaccataaaccaggccgggcgcagtggctcacacctgtaatcccagcgctttgggaggccgaggcaggcagaccacctgaggagttccagaccagcttagtccaacgtagtgaaaacccgtctctactaaaaatacaaaaattagctgggcgtggtggcaggcgcctgtaatcccagctacttaggaggctgaggcagaagaatcgcttgaactcgggagttggaggttgcagtgagccgagatcgcaccactgcactccagcctgggcggcagagcaagactctgcctcaaaaaaaaaaaaaaaaaagactataaaccagatctgagcatggaggcttgtgcttgtaatctcagccctttgagaggccaaggtaggaggctcacttgaggccaggagctagacaccagctgggcaacatagcaagaccccttcccttaaaaactttttaaggctgggcgcggtggctcatgcctgtaatcccagtactttgg[136 bp omitted]ctgaggcaggagaatggtgtgaacccgggaggtagagcttgcagtgagccaagatcgagccacttgcactccagcctgagcaacagagagagactccatctcaaaaaacaaagcaaaacaaaacaaacgttttaggctgggcacagtgggttcacgtctgtaatcccagcattttaggaggccgagatgggaggatcacttgagaccaggaggtcaagaccagcctaggcaacatagggagaccccgtctctacaaaaaagttaaagaattcgccgggcatggtggcagacacctgtagtcctagctacttgggaagctgaggtgagagaatcacttaagccccagagatggaggttccagtgagctgtgatggcaccactgcactccagcctgggtgacagagcaagaccctgtctccaaaaaaacaaaaaaactgtaaaccaggagccagatgtcctggcttcaaatcccaactgtgccatttattagctgtgtgaccttcggcaagctgctttacctctctgagccatattttattttatttgagacacagtctcgctctttcagccaggctggagtacagtggtgcaatcttggttcagcttactgcaacctctgcctccctggttcaagcgattctcctgcctcagtctcccaagtagctgggattacaggtgtgcaccactgtgcctggctcattaacattttactttttgatattaggattgagtccatatatatgtggcacttagaacagtgcctggtgtctaagtgcattatatatataatcatattagggctgggtgcggtgcctcactcctgtaatcctggcgttttggaatactgagactggaggatcattttaagccaggagtttaagaccagacttggcagcaaagtgaggttccatctccacaataaacaaacaaccaaaaattagccaggcatgatggcacgagcctgcggtcccagctactcaggaagctgaagcaggaggattgcttgagcccaagaattcgaggctgcagtgagccatgatcacaccactgcagtccagcctgggcgacagaatgagatcccatcttaaaaaaaaaatcctggttgggcgaggtggctcacgcctgtaatcccaacactttgggaggccgaggcaggcggattactcaaggccaggagtacatgaccagcctggccaacaaggtgaaactccgtttctactaaaaatacaaaacttagccaggcttggttgtgggcacctgtaatcacagctacttcggaggctgaggcaggagaaccacttgaacccaggaggtggaggttgcagtgagccaagattgcaccactggactccagcctggatgacagagtgagactacgtctcaaaaaaacccccgaaaaaaaagaaaacaaaggcttccagaggttaggacacttgtaccaggtgggttagctgatcaaggaagaattaaagaggtgggtggggaatagactgagtcaaggacaggtgggacatgaagcttggggtggggaggaattatgtgcgtcttacctccctctctgaggactcctcgccctggagcacgggagatggggagtcaggctcagtgtgtgggggcggtttctgggggccacccagacctgccagcgtgtcttccaccatccacagctgctgctgagcagacactctgtcctgcagggaggaaaggaatttgttacttaaaggtgggaaaacgcaggagggtttcagctaataggcccctgcaaaggtctgaaatcagctgggctatatttatggagttgggatttattttt[224 bp omitted]gaggc[138 bp omitted]cacctgtaatcccagcattttgggaagccgaggcgggtggatcaccagaggtcagaagttcaagaccagcctggccaacatggtgaaccctcgtgtctactaaaaatacaaaaaaaaattagccgggggtggtggtgcatgcctgtgatcccagccactcgggaggctgaggcaggagaattgcttgaacccaggaggtggaggttgcagtgagctgagatcgtgccactgcactccagcctgtgcaacagagcgagacactgtctcaaaaaaaaaaaaaagaaaaagaaaaaactgtcttttctttctatgttgttttactgtgttacatctattataaataggtgaccatacgaatatgagagtctgttctttttgtttgtttttggagacagtccctccctctgtcacccaggctggcgtgcaatggcttgatcatagctcactgcatcctcgaactcttgggcttaagcgatccttccacctcagcctcctgagtaactgggaccacaggcgtgcacaaccaggcccagctaattttttcacttttatttttagtagagacagagtttcaccatgttgcccaggctagcctcaaactcctgggctcaggtgatccacctgcctcatcctcctaaagtgctgggattacaggtgtgagccactgcagctggcatgggtctgttcttgccaagtctggattgtagatctagtgggagcagcttagagtgagaagatgcatttaaaactaggcatcaatggttttttgttttttggggttgttgttgttgttttttaagatggagtctctccctatcacccaggctggagtgcagtgtcacgatctcggctcactgcaacctccgcctcccgggttcaagcgattctcctgcctcagcctcctgagtagctgggactacaggcgtgcaccagcacacccagcaaatttttctatttttagtagagacagggtttcaccatgttcgtcagattggtctccaactcctgacctcaagtgatccacctgccttggcctcccaaagtgctgggactacaggcgtgagccaacacgcccggccgtgtcaatgtttttaaagatacatgatttagaacttgatggctagatttagagtgaaaaagcaggtctgaggctaagcaatgaggtttatattttaggagcagagcttgcactaaaggaatgggttcagaactggaactccagaggataaatttaacagcaaaagtcaggatgcaggatgcaagagatgaacttgcaagatggaaaaaaggctgagggttggagttttgctggtgagagcatggcttcaacaagaggagagatttagaaccaggggagagagcagctctggatctgaagtaggtattaaaacgaaaggcattggccgggcgcagtagctcatgcctataatcccagcactttgggaggc[134 bp omitted]aggagaatcacttgaacccgggaggcagaggttgcagtgagccgagatcacaccactgcactccagcctgggcaaca[148 bp omitted]ctactaaaaatacaaaaattagctgggcatggtggcacacacctgtagtctcagctactggggaagctgcggcaggagaattgcttgagcctgggaggtggaggttgcagtgagtcgagattgtgccactgcactccagcctggcgacagagcaagactatgtctcacacacacaaaaaaagaaaataaaaaatagaagggctgtgtgcggtggctcacgcctgtaatctcagcactttgggaagctgaggcgggtggatcacctgaggtcaggagttcaagaccagccggaccaacatggagaaaccccgtctctcataaaactacaaaattagccagacatggtggtgcatgcctgtaatcccagctactcgggaggctgaggcaggagaattgcttgaacctgggaggcggatgttgcggtgaaccgagattgcaccattgcactccggtctgggcaacagaacgagactctatctcaaaaaatataataaaataaataaaataaaaataaaagagtaggccaggcacagtggctcacaccggtaatcccagaactttgggaggccgaggtgggtggatcacctgaggtcaggagttcgagaccagcctgaccaacatggtgaaacccccctctctaccgaaaatagaaaaattaaccgggcatggtggtggtcatctgtaatcccaggtacttgggaggctgagggaggagaatcgtttgaacctgggaggcggaggttgcagtgagccaagattgtgctactgcactccagcctgggcaataaagcgagactgtctcaaaaataaaaataaaaaataaaagagtataatggattgtttgtaacacaaaagataaatgcttgaggggatggacaccccattttccatgatgggattattatacattgcatgcctgtaccaaaatatcttatgcacttcataaatatattcatctg[142 bp omitted]gaaaccccgtctctactaaaaatacaaaattagctgggcgtggtggcgggcacctgtaatcccagttactcaggaggctgaggtgggtgaatcgcttgagcccgggaggcagaggttgtggtgagctgagatcgtgccattgcactccagcccgggcaacaagagtaaaactctgtccccctccccctcaaaaaaaaatgttgtaaaattatagccaactttacagcagaaattaggtctggcgcagtggctcatgcttgcaatcccagcactttgggaggccgtggcaggcagatcacttgaggtcaggagttcaagaccagcctgaccaacatgtctctactaaaaatataaaaagtagctgggcatggtggcatgtgcctgaaatcctagctacttgggaggctgaggtgggagaatcacttgaacctggaaggcagaggttgcagtgcgccaagattgcgctactgcactccagcctgggcgacagagtgagactgtcttaaaaacaaacaaataaacaactttacagcagaaattagataacagctcgagaaaacggcattcaaaattgaagcttaattaaaattttaatgagagaatttaaaaaaaaaccccaaagggcatggtcttaactaaaataaggggcttagattgaaaggacagaaaggaggctaagggtcaactgggcggggcctcgattctgtgggcgaagattaaatgctaaaaggatttccaggcagaacttggagttgggggtgggtcttggggtctccaagcagcgatttacctggggagaaccaaggtgcagcaggtactccagcgtctctcttaaggtgcccagctcctgctccaggccactgtacgtgtcccaaaccctctctcgctcctcaggttgcataaagggggagacataggttaggtccctctcccaccagatccttccccaccccatcatttgtcagctaaggaggagataagggagtttggtccctggagccctgcaggcgtatggactacaattcccatgggcctctttgcttggactactgggaaccccaaagtctgtatggaacctgcaattccagtacactgctagtgtagacaaataacagcattccctgaatccccaggattacttctgctctctcctaggtagcagagtctacagatctaatgaatttcattagacagttaaaagaccacagcacccagccagacacggtggttcaggcctttaatcccagctatttgggaggccaaggcgggcggatcacttgaggtcaggagttcgagaccaccctggccaacatggtgaaaccccgtccctactaaaaatacaaaaattagccaggaatggtggcgagggcctgtaatcccaggtattcgggaggctgaggcaggaggatcacttgaaccagggagacagaagttgcagtgagcctggatccaggcgctgcactccagcctgagcaacagagcaagaatccgtctcaaaaaaaataaccacagcacccactcaccctggggcagcagaaacttccttgccaataccaacaataacaatgataatatcagctaacacttattgggcactgatcatgtgctaggcattgttctcaactctcatttaattcctatgaggtagttactattattgtctccattttacagataataattatagctgacacttaagtattgctttaccaagtaccaagtaccttaagtgttaaatattcattcattcattcattcattcattcactcattttcacgtatcacatataataattctcagagttacttaaggccgggcgcagtggctcatgcctgtaatcccagcactttgggaggctgaggcaggctgatcacctgaggttaggagttcgagaccagcctggccaacatggcaaaaccccatctctactaaaaatacaaaaattagccaggtgtggtggcacatgcctgtaatcccagttactcaggaggctgaggttgcagtgagctgagatggcaccactgtactccagcctgggcgacagagcaagactctgtcccccccaaaaaaaaaaaaattagagtggttacaagacaatgaggagagagaaaaaataataaaatttggagtgtagacttctgaagaacgatcttcctatgagccctctggggcaggtccccttcgtaacgacttgcatagtcctggggcctcctaggagggcaggccccttcccaggtgctcacctgagtcaagtgacagagggtggccctcacactgaccagccggtcctgcaagaggcgctggcgaccccaggccctcccgggagccccagcctccctggtggcttggcccagctgttgccgggtcaactccagagctgcttctagttgctcctgcaccaagacagaaggtggttagacttcagaagccatgcctagccccaagaagaaagaaaagatgtcctttcacgtcctggacgtccagtcagcatcctgacttccgcattcaggaagggctcagggcaggcagagaggccaggcgccctgtccttggcccagggccccgcaccttctcctcctgcttctggtctatctcctcctgcagcctccgcagaagccggtcctgcccgcacaacttggtcagcagcgtctggagaaaggagagcgggagctactgatggtccagatctggctcttcccctgccgctcctcccatcatctagaacattctctccccaactctgggaactcagcaaggattagatcagtgacaacttacatctgtctccaagctttggtggaaagttgactccaggggaggacccggctgaagagaaggaaaaaagtcaggggtcaaaggggacaggctggtcattcttgtaactcagtgctgagccacgccctgtctctactgataggtactgcactatttatttatttatttatttagagatagggtcttgctctgtcacccaagctggtgtgcagtcgtgcgatcatggttcgctgcaggctcaacctcctgggctcaagcaatcctcccacttcagtctcctgagtagctgggaccacaggcgcacacatcatgcccggctaatttttgtagttttaaaatttttgttgctgttggttttggtagcgatggggttttgccatgttgcccaggctgatctcaaactcctgggctcaagcaatcctcctgcctcggcctcccaaagtgctgggattataggcatgcaccatcatatcatgcctggcctttttttttttttttttttttttttttgagtcaaggtctgtcacccaggctggggtgcagtggcatgatcatggctcactgcagccttgaactcttaggctcaaaggatcctcccacctcagcctcccaagtaggtgggacaacagatgccagccaccggtgccagctaaggttgtttgtttgtttgttttcagggctggggtctcactatgtcacccagaccagtcttgaactcctgatctcaaatgatcctcctgccttggcctcctgaagtcctgggattacaggcatgaaccaccaagcctagcgacccctctccttatcagcttccttctaagcattagcaaatttcagtagaccaacttccacattcttggcttcagaaagatcaataatgggctcttgatcaagcagccatggcaaatattataattaatggagaaatttagacattttatttatgactaagaataaaacaaagtgcagggcacagtgactcactcctgtaatcccaaagctttgggaggccaaagagggaagatcacttgagcccaggagttaaagaccagtctgggcaacatagggagaccttgtgtctgcaaaaaaaataaaaataaaaaaatagggccgggtgcggtggctcatgcctgtaatcccaacactttgggaggccgaggcgggtggatcacctgaggtcaggagttcgagaccagcctgaccaacatggtgataccctgtctctactaaaaatacaaaacttagccaggcgtagtgacgggcgcctgtaatcccagctacttgggaggctgaggaagaagaatcacttgaacccgggaggcagaggttgcagcgagccgagatcgtgccattgcactccagcccgggtgacagagtgagatttcgtctcaaataaataaataaataaataaataaataaataaaataagctgagcatggtggtacatgcctgtagtctcagctactagggaggctgaggtgggagtatcgcttgggcccaggagactgaggctgcagtgagccatgattgcaccactgcactccagcctgggtgacagagtgagactctgtctcaagaaaataaataattttttttaatttaaaaaaaaacaaaaaacagcctgggtaacatggcaaaaccctgtctctacaaaaagtagaaaaagttagctaggtggccaggcgcagtggctcatgcctgtaatcccagcattttgggaggccgaggcaggcagatcacctgaggtcgggagttcaagaccagcctgaccaacatggagaaaccctgtctttactaaaaatacaaaattagcagggcgtggtggtgggtgcctgtaatcccagctactcgggcagctgaggcaggagaatcgcttgaacccaggaggggaggttgcggtgagccgagatcacgccattgcactccagcctgggcaacaagagtgaaactccttctcaaaaaaaaaaaagaaaaaggaaggaaagaaggaaagaaagaaagagagagaaaaaggaaaggaaaggaaagaacgaggaggggagggg[359 bp omitted]gaggcaggagaattgc[263 bp omitted]caaaaaaaaaaaaaaaaaagaaagaaagaaagaaaagaaaagaaaaagaaagagaaagaaagaaagaaagaggtttttgcggatttaagttaagttacgacgatgtcatggggtgtcctaataggaggagatggacagcaacaaaaacacaaaggaagatcatcatgggatgatggaggcaaagatgtggccataaaaaaaaccacagaacctcaggaattgctggcaaccaccagaagctaagagagagtcaataaaagctcctccttagaaccttcagtggaagtatagccctgccaatcccttgactccaggcctctggcctccagaaccgcaagataatccatttctgttgttttcggccatgcgctttgttacagccaccacatgaatctaatacctacccagggtctttgaaatatctacagttctctaggcaccctaggccaagagatgacattcctcatagagaagaaaggaagggagggggctccggtagatttagggtactccaggatacctaccaataaaaccatggaggcccgggtcccagggggccgcggggggagctggagataagtgggggagccagagtgtgcctgggaggaacgttgaaatggagatgtttagaaactggcatgtctgggagacttttcattttgttctgtactaagaaaaattcttctgccttgggatcctgttgatctatgaccttacccccaaccctgtgctctctgaaacatgtgctgtgtccactcagggttaaatggattaagggcagtgcaagatgtgctttgttaaacagatgcttgaaggcagcatgctcgttaagagtcatcaccactccctaatctcaagtacccagggacacaaacactgcggaaggccgcagggtcctctgcctaggaaaaccagagacctttgttcacttgtttatctgctgaccttccctccactattgtcctatgaccctgccaaatccccctctgcgagaaacacccaagaatgatcaataaaaaaataataataataattaaaaaaaaaaagaaactggcatgtcttagtgacaaatagtagagtgggcatgtccataattgaagtgctttaggagatattttgaggttcagaactgggccctctcaacttcctcaactacctgctctccagctgtgtgccactgtggggacacagagggtgataataaatgcaccagcctggcaaaacagccccacaagatgatggaatttgctactctcattctcagacttgcagtcagctgtggatattctgagctaccgtcccatgatgctcagacaaaacagcaggcaaccaacttgcaaggtgaactggggacacaagggagatgcaaacctctcaccgcactgtcttggcacagagta[139 bp omitted]gtcaacatggtgaaacctcatctctaccaaaaatataaaaatcagccggacgtggtggcaggtgcctgtaatcctagctactcgggaggctgaggcaggagaatcgcttgaacccgggagacagaggttgtagtgagccgagatcgtgccactgccctctaaccttggcgacagagcaagacctcagtctcaaaaaaaaaaaaaaaaagcaatggccgaagaccagcctagaaagacagcccagacacctgagaggagctggacacctgataggttcaagctctctctcacctgagcccagctgagatcattatggactacaatacccatgacacccagggagcaatggccttgagaatacggaaagacagccctgaggcctgatgggaaacgtagtcccctccttctcacctctctgctcacctgtgttctgggctcctgactccagtgctggggactcctggggggctttcctcccccagcctcagagggaggtcctcggcggggagtagggggtcgggagagggtctggcgttgggggccccaatccagaggaggtcggacatcaatgcgactcaacggggtgtgaggtcgggcagggggtgctgtgtctcctgagggggcagggggtcgccgcgcaggggcagaacggggacgggggaggctcagaggcgagggagggcgagagaggggggtgaacaggctgtgggaaggagagaatcggggaactgagtcaactagagccctctccatccacctccttacccatcaagtcagcctcaaggacatgtctcacttcactgtgtcttactgtcccactgggttagaatcctcctctactgtccaaatcctcagtaatgtccgctttgtggcatcttcccctccagtcttctccccgacaggctgtgacccccacgggagccccagcaagtcacacacactcaagcagaaagcgctaaggcccgcccccaaccagtttccggccctgcccttctcttaggccacgcccacaaccatgtcctccctactcactcggggctcctcgccctccgcatctggagtccagagtggaggtcggttgtggggctgggagtgagcagcctgggtctaccacgacctctggagagtcgagtcacttccggtgattctgagatgcgcccctcttcccctctgctcacctccgggggaccaccggggccgccggggccctccccgggctggggtcgtgcaggtgacctgggttgcccactagcgagtggacatagacaagatatcactccttcgaacttcataacagccctattctcttgtcacaggtgagaacacaaggatgcacccaaaaaaggaaagttgtgcactataaatcatcgtcccccttcttcagaaggggaaactgaggcctccaatgtgaaactgacctgtgcgccaggccacaacgtctatccaggttgctggacccaatgccccggaatatgggatagactcagccaggtagtccagtttccagcctgataattggcgcaggccatgtcagagcctaagagatagtctgacatttttttaaaatctgatactatcttttacctggcattgtttaggtggcagctcaggggacttcagaaggagccaatcagagagtgtgcaatattgatcattcctggagcagagctgagtgcgtgactgaagggtcagcttgggggcggggacggacaaggtggtgggcggaacttaagggagaaagacttttgctgattggaaaagttccctggaggtggggcctagaagacgaggcgccttagctagaagactggtgattggacactcaagggggcagggccccaaaggggaggagttgggatgacgagactgactcagggtggagggtcaggagcatggcttggacctctactcactagtcgtccccctccgcacgggaggcccggcccagcgcccgtagccagccccgcaggtcttctaaggtgtcagcggccaaaacgtaggtcctcatgcccgggtgctctgcctgcgggaagagaaggcttggaatccggactcccgggccttgtaaaaaggaggacaggccggaccggtgactcattccagtaaacccagtgctttgggaggccgatgcgggaggatggcttgagaccagcctaggcaacataatgagacacccccctccacctccttccgcccccgtctctacaaaaaaatcaaaaaattagccggacgtggtggagcgcacctgtagtcccagctaccggggagactgaggcaggaagactgcactttgcgtcgctgcacgccagcctgggtgacagagcaagaccgtcaagaaagaaaggaaagagggaaagagggaagggaagggagagaaagaaagagagaaagagaaagaaagaaagagagagagagaaaaaaaaaggaaaggaaaggaaaaaggaaaggaaaggaaaggaaaatggaaaggaaaggaaaggaaaggactggacagacgcggtggctcatgcctgtaatcccagcactttgggaggctgaggtaggcggatcacctgaggccaggagtttgagaccagcctggccaacatggcgaaaccccatctctactaaaaatacaaaaaattagccaggcgtggtggcgtgcgcctgtaatcccagctactccagaggctgaggcaggagaatccgttgaacccaggaggcggaggttgcagtgagccgagatcgcaccactgcactccagcctgggtgacagagagagactctgtctcaaaaaacaacaaaacaaaaaaacaaaccaaaacaaaacaaaacgaggatgcaattgacgcttgtcaagaccttttatctccagtaatggatattccagtgcttgttaggacttggagtttcctcgacagatatctacccgccctcatctccagttcccatcgcctggtgcacaacatggatggatggactcacggtgaaggtgaagcgccgccctcggggggctcccggcccatctggtctaatattgtagctggggagcaggacgctgcctaggacactctcctcgcggctgtctgcaaagaggggctggggtcaaggatcacacagggatcagaaggccaagatgctagagagaagggcagactgggcgggggggccctcccaccccaagccagccagccagccactgacccttgtaataaaagaggcaatggccggagaggacgaaccagcggcgtttccagagacggagccccgagctgtcctggggagagagatgggaggaggggcctgagtaaagggaaacagaaaaaggggatgaaggcagtgacgatggggacagagagccagagagagaaagaaacttggagagaggagaacagagacataaagtagggatcaagagagtggggtgaggccgagcacaatggctcacgcctgtaatcccagcacttagagaggccaaggcaggtggatcactcaattccaggagtttgagaccagcttgggtaacatggcgaaaccccatctctactactaaaaaaaaaaattagccaggtgtggtggcgcgtgcctgtagccccagctactccggaggctgaggagggaggatcacttgagcctgggagtggggtggaggcacaggagaaagacccagagagacagaagagacagagacacatgtttggggcaatggagtggataagaaggagagctggaagccctctgaacatgatagaatagaatagtagccctacttcttttcttttctctctcttttttttttttttttgacagagtcttgctctgtagcttaagctggagagcagtggcatgatctcggctcacggcaacctctgcctcccaggttcaaatgattctcctgcctcagcctcccgagtaactgggattacaggcacgcaccaccacacccagctaatttttgtatttttagtagagacagggtttcactatgttggccaggctggtcttgaactcctgacctcaaatgatctacccacctcggcctcccaaagtgctggggttacaggcgtgagccactgcgtctggcctcccccactttctttttttgttttttgagatggactctcgctctgttgcccaggctggagtgcagtggcacgatctcagctcactgcaagctccgcctcccgggttcacgccattctcctgccccagcctc[226 bp omitted]tccaccttcatgttttctcgtctatccgctggagattgagaagttttagggaggtttggatgagacatggaccacatatgggcagactttagctgcagagacttagtccaattattctggagcctgagacacagagaggccaggaaggtggcaatgagccatgacccaaatgcagcgtctccacctgcctgaactactcatcgcctctgcctgaactactccactaactatctccaacctcgtgtgcctcttctcctcaacccattcccatagaagcccacatgatcttttaaaattataagttagatcacgtgagtccccttttcaaaacagagaattaagaacacttgaaattcagtctcaaattccttaccatcacttactgttttttgtttgtttgttttgttttgttttgagatggagtctcgctctgtcacccaggctggagtgcagtggcacaatctcggctgactgcaatctctgcctcccgggttcaagcgattctcctggctcagcctcctgagtagctgggactacaggtgcctgccaccatgcaggctaatttaggttttttgtttttttttttttttgagacggagtcttcgctctgtcacccaggctggagtgcagtggcatgatcttggctcgctgcaagctccacctcctgggttcacgccattctcctacctcagcctcccaagtagctgggactgcaggcgaccaccaccacgcccg[131 bp omitted]caccacgcccagcctaatttttgtatttttagtagagatggggtttcaccatattggccaggcttgtctcgaactcttgaccttgtgatccacctgcctcgacctcccgaagtgctgggattacaggcgtcagccatcgtgcccagcccatgtactgctttgcagagagttttgagtttgaaggtgcataagaatcaccaggaaggtgtgttaaaacacagattctggggccccatccccagagttcctgatttggcaaatctatgatggtacctcatcatttgcctttctagcaagtccccagatgacgctgatgctgctggtctgggaccacactttgagaaccactgctctgctgctcctcctggcttcttcccctggcctcacttgacaccaaggttttgcctgctgcagaccttttccttttggatgcgatctgcctccaggtcttttttttttttttgacatggagtctcactccatcatccaggctggagtgcaatggcgcaacctcggctcactgcaacctccacctcccagattcaaattttccttgtctcagcctcccaagtagttgggattacaggcacccccaagctggcccggctaatttttgtattttttagtagagccagggtttcgccatgttgaccaggctggtcttgaactcctgacctcaggtgatccgcccgcctcagcctcccaaagcgtttgaattaccggcatgacccactatgctcagccagctcaaatgtcacctcagagataattttccctgaccaaatgtcaaattgaagttctcctctctcagccacgttcaagcacatcatattccgtttttttgtttttgtttttgagacagggtctcactctgtcacccaggctggtgtgcagtgacatgaacacagttcactgcagcctcagcctcctgggcttcagcaatcctcctgccttagcctcccgagtagctgggactataggcgcacaccaccacgctcagctaggttttgtgtgtgtgtgtatttgttgttgagatgaggtttcttcatgttgcccaggctggtctagaattcctaagctcaagcgatcttcccgtcttggcctcccaaaatgctggggttacaccactgaacctggaccctatgttacttcttcatagcccatcctgcgatctgaaatgaccaagtccatttatttatttactaatttattatccacccatgctccacccaatctggaatgtaatataaatacttttgtgttatttgcatggtgtgtgccctgggattgggaacactgtaagtgttcaagaagtagtcaagaaagaatgaatgaatgggccaggcacggtggctcacgcctgtaatcccagcattttagggagccgaggcgggtggatcacttgaggtcgggagtttcagaccgccctggccaacatgataaaaccccatctctactaaaaatacaaatattagctaggcatgatggtgcatgcctgtaagcccagctactcgggaggctgaggcacgagaattgcttgaactggaggccagaggttgcattgagccgagatcataccactgccctccagcctgggcgacagaaagagactctgtcttaaaaataaataaataaacaaacaaacaaacaatgacggactaaggggaggggcagtgatagcaagaaaaagaaagcctatttggggacttgcaaggagagagacagaggacagccggggcacagacttcagtgtccttttccttctcctactgaccccacctgcttatgaagccagcctcggatgtgcacgggaaggttgggatccctcctgagcgcattgcctctcttcccaaaggcgtggatcttgtttactgcccgggtgggcttctgaggagagaaggggacagaagtgaacagggagagcctaggatggtcctgggagggggtgagggtggacacaggcaaccgtaggctctcgcttggctgccctgagaaatgggtcaaggaccag[180 bp omitted]gaggcaggagaatggcgagaacccgggaggaggagcttgcagtgagccgagatcgcaccactgcactccagcccgggagacagagtgagactccgtctcaaagaaaaaaaaaaaaagaaagaaagaaaagggtcaaggtgggggctgaagttggagatcagaattgggaggtgttcttattgcagagttaagagactcttttttttttgacaggctctttggagtgcagtagcctaaacactgcagcctttacctcctggactcaggtgatcctccagcctcagcctcccatgtagctgggaccacaggcatgtcccaccatgcccagctaatttttttactttttgtaggggacgggggtctcactttgttgcccaggctgggagagactctttttttctttttcttttgagacagagtctcgctctgtcccccaggctggagcacactggcaccatcttggctcactgcaacccctgcctctcgggttcaagtgattctcctgcctcagcctcctgagtagctgagattgcaggcacgtgccaccacgcctggctaatttttgtatttttagcagagacgcggtttcgccatgtcagtcaggctgctcttgaactcctgacctcaggtgatccacccgcctcagcctcttaaagtgctgggattataggcgtgagccactgcgccgggccgagactctttttttgatgggcagagggaggtgttcagaggcaaggaagaggctgtagggaagcaatttggggatcaagcatccactgccaagaagcagatgcccttggccaccagagccagagctgtagtaggtcctttgggatctgaactgggactatgggctgggagggccccataatcagggggaactctcacgctgagtctccagtgaatcaaaggatgccctggtgccctgcggtcacaccccttagcaaccaagtacaaggagaggaagcctcaaatccctccatcctgcccggatggagcctcatctcctgatgcccacagatatctcaggcatccttagccaggtcccgacaatatgcccttccttggaagcggtggtactgaccaaggctgagatcagatctctgggctctgaacttgagaaacaatatgtgtggaacggcaggaggaaaaagaaatgagtgtctccctaagcttttggctgggatgccgatttgggatgcaagtatctggaggccccttgggtcttattgtcagagaagggtctctccttataggatttcattagtgggtagattggatggcgagagataggacagcaagttctggcactaatcaagagcagccactacttctcagaactcgaggggcctcatggctggggagcggctttatcttagcaaccagggtcaagggaggttgttactctggtttagaattaggaaaatacaaagggtggggacagagctgggagtgcctctgaattcctagctgcggtgtgtaggcaatttgggaccttactatgtctggcagaccccgttgctaaggatctttgtccttaacaaccagagtccttggggaaacagaaggatgggcggcccagagccccaccttcctccccatccccgccaggaagctcaaaccttggggctcaggctgctgagcgaggagatggtggaggcgctgctggccaggctcaggctgctgcgaggtcggctcccctccatcaagggctgggggagagaaagaaaggggctgtgtctctgcagtgacgggtgtgagacagagatggggtcaggggcttggaggtcggaggaggctgcagagaaagagcctgttgtttcgggacttggggggctgggggaggccatggcccgtgaccacataccaagagtggtgccaagagaggtaggcggccctggcagctgcgggagggggcagctgtctgcagcccaggccagagaataggggcttctttattcctgcccactgcactcaggccaggaatttgaccctctctgtgcttagggactccccattccctgcctccttccggctgccccaggctacctgtctcccgccctcccacatgcacccccaaaccacccctgccaactccccaagccaagccctgcggcaccaggaatgtgaacccagagagcccctcccagcccagccagggaacttacccagctctggggtcccagtgacgggggggcaagaggacggtgtgggtgctgcggcacctaggcagtctcccgcctcctttgtctcttagctgctgtctctcatagttctcaatctctctcctcacctgctcactcacactttttgtctctttgtctcctgtctcttacggtctctctctctctctcttccttttacactacctctctccccactctcactttctgtgtctccctctgatctctgtctcttccagtctctctctcactcattctctccctctctctctctctccaatctttctgtttctgtccaaatcttttattgtcagactcacagggtctcttccttaagtctctgtctcattctctctctctctctctctctgtctctcagtcatcccctgtgtcctctctccttcacactcagtctcttcctctttctctctggctctgccgtttcctcccttttctctttccgatttcccttctcactttctcccttcctccctctcccagtttctctttcctctctgctggtctttccctgcctctgccagccgcccacgctgctgttctcccctcccaatcccggctgtccccgccccttctggcctccccactacagcctgacctctggctcagctgcccccatagctgaagggaggggcttgggccccccaattcccaggtcccctaaggaccaaggttgggacttctcagtgtttggagagttggacttgaggcctgcactccagggcccccgtgggtttgctgctgtggttgggggcctgagccactggtgtcctaaacggaggaggcttgtgtcctgcaaggggtggggactcaaatttccaaagccctggagggaatgggttagggatccagactcctgggtgcccgagaaggtctgagctaggatcaggactcctgagtcgtgaaagagctgggggtctggaaacatggctgtgcttggaaggggccagggacggtttgtccaggtcccctagggagaaaaggggatggtcccagtagggcagggtgaaatggagagttccaaacctccacctcagatccaggtgagaattctcttctagactgaggacaactccctcaggagagagacatgattccttggtatattttgaggaacaagattatgcatccgtaggcaggggaggagagcggggggctggaactgtcacccagggcctggaacttgtagcagaagcgcccccacccgcacaaagagtgccacccaggcagaatcgcggcttgtgggggcagagctactgcctaagtctgaagcagatgacacccaggagtggagccttgtgcctgtgaccgggaaggaatctgagctttcggtttaactgccattcaccatgcacctgttgagcacctactgtgtgcaggcac[136 bp omitted]atagcgagaccttgtctctatttagaaaatgaatttcttttttttttttttttgaggcggtgttttgctctgtcgccaggctggagtgcagtggcgtgatctcggctcactgcaacctccgcctcccgggttcaagcgattctcctgactcagcctcctgagtagctggaactacaggcacatgccactgcacccggcctaaattaattattattattatttttttgagacggagtctcgctctgtcgcccaggctggagtacagtggcacgatctcagctcactgcaagctctgcctcccaggttcacgccattctcctgcctcagcctcccgagtagctgggactacaggtgcccaccaccacgcccggctaatttattttgtatttttagtggaggcggggtttcaccgtgttagccaggatggtcttgatctcctgacctcatgatccacctgcctcagcgtcccaaagtgctaggattacaggcgtgagccaccgcgctcagcctaattacttttttttgaaaagcattgagcccagcaaagtgcctgatctcatagtgcttacatcctcattctcatttgcaaggaatctggaccctgctgtgactatcttggtcaagtggcttcatttccaagcctgtttccccatctgtgaaatgggaacaatgacaccctcgcactcggggaggaaaccaaccacatgtgaaaataggagactctagccaggcgtggtggcaagctcctgtactcccaactactcaggaggctgaggcaggagaattgcttgaacccgggaggcggaggttgcagtgagccaagatcatgccattgcactccagcctgggtgacagagtgagacaccgtctcaaaaaaaaaaaaaaaaaaagaaagaaaaagaaaaaagaaagaaaagaaaaaaaaaagaaaatgggagactctaggctggggcctgtgggctaaattggggtaggaggccaggcacagtggatcacaactgtaattccagcactttgggaagccaaggcgggcagatcacct[143 bp omitted]tctactaagaatacaaaaaaaattagccgggcgtggtggtgggcacctgtagtcccagctactagggaggctgaggcaggagaatggcgagaaccagggaggaggagcttgcagtgagccaagatcgtgccactgcactccagcctgggcgacagagcaagactccgtctcaaaaaaaaaaaaaaaaaaaaagacctgcctggtcaacatggcgaaacactgtctctactaaaaatacaaaaattacccaggcattgtggcacatgcctgtaatcccagctactccagaggctcaggcaggagaatcgctggaacccaggaggtggaggttgcagtgaaccgagatggcgccactgaactccagcctgggcgacagagtgagacgcctactcaaaaaataaataggctgggtgcagtagctcacgcctataatcctaacactttgggaagccgaggcaggcagactgcctgagctcaggagttcgagaacagcctgggcaacatggcgaaacactgtctctactaaaaatacaaaaaattagctgagtgtggtagtgcgtgcctgtaatcccagctactcggaggctgaagagggagaatcgcttgaacccggaagatggaggttgcagtgagccgagatcacgccattgcactccagcctcggtgacagagcgagactccatctcaaaaaaaaataaaaaaataaaaaataacaaataaataaataggcctggagtggtggctcacgcctgcaatcccagcactttgggaggccaaggcaggcagaacacctgaggtcaggagttcgagaccagcctagcaaacatggtgaaatcccgtctca[133 bp omitted]atggagaaactacgtctctactaaacaaatacaaaattagccgggcgtggcggcacatgcctgcaatcccagcactttgggaggccaaggcgggaggatcccctgacgtcgggagttccagaccagcctgaccaacatggagaaactacgtctctactaaacaaatacaaaattagccgggcgtggcggcacatgcctgcaatcccagatactcgggatgctgaggcaggagaatcgcttgaaccccgaaggcggaggttgcggtgagccgagatcgcccctttgcattccagcctgagcaacaagagcaaaactccgcctcaaaataactaactaaataaataaataaattggggtgggaaggcattgaccctgagctgagagagaactggctcgctgttgaagcagggccacgcatttgattgacagttcgtttgttggaggggcgtggtcacgctcggaaactccgccgtgacgttgcaaaagctggaatctccgcgagaagtcctgtcttacttccacttcccacccttcgggttgcggtctcgaaaccccgcctctcttcgtgacgtcagcacgccgggcgcggtaggctataaaagcctagtggccattgtgttcgttgctcttatcggttcccatcccagttgttgatcttatgcaagacgctgcacgaccccgcgcccgcttgtcgccacggcacttgaggcagccggagatactctgagttactcggagcccgacgcctgagggtgagatgaacgcgctggcctccctaaccgtccggacctgtgatcgcttctggcagaccgaaccggcgctcctgcccccggggtgacgcgcagctcccagccggtgagtaaggggtcggaacgcctgggtccccacggggctgggggcccggatttagaaaggagaaggggttgggagcctggagtcctgagcctgagggaggagggatctggaagccagattcttgggtcccccgtgaaggaatcatctgccaagtagggggtcgggtcagaatgtttcagtctgcgagggaggagggtgtgagggtttgatttgtcaatcttcagcagaatgagagagctagggactatgactttgtcgccaagggaagcaagtaaagacttttgttcttggttcttgggactgggagttctgcgtctgaagaaagagagggctgggggcttggacccttggatctaaggcagaactaggggctcagactcctggctattgagagataagaacagagccaagggacagagatgggcgtggccgagatcagaaaggaatttgggactctcgcgttgctatttacaatagttgtgttactatttccgttgctatgactcatagtcacgcccggatgccatcctctaaatggcccctaaactttatttttttctcccccttttccagcccagacacatggccccaggccaagcaccccatcaggctaccccgtggagggatgcccaccctttcttcctcctgtccccagtgatgggcctcctcagccgcgcctggagccgcctgaggggcctgggacctctagagccctggctggtggaagcagtaaaaggagcagctctggtagaagctggcctggagggagaagctaggactcctctggcaatcccccataccccttggggcagacgccctgaagaggaggctgaagacagtggaggccctggagaggacagagaaacactggggctgaaaaccagcagttcccttcctgaagcctggggacttttggatgatgatgatggcatgtatggtgagcgagaggcaaccagtgtccctagagggcagggaagtcaatttgcagatggccagcgtgctcccctgtctcccagccttctgataaggacactgcaaggttctgataagaacccaggggaggagaaagccgaggaagagggagttgctgaagaggagggagttaacaagttctcttatccaccatcacaccgggagtgttgtccagccgtggaggaggaggacgatgaagaagctgtaaagaaagaagctcacagaacctctacttctgccttgtctccaggatccaagcccagcacttgggtgtcttgcccaggggaggaagagaatcaagccacggaggataaaagaacagaaagaagtaaaggagccaggaagacctccgtgtccccccgatcttcaggctccgaccccaggtcctgggagtatcgttcaggagaggcgtccgaggagaaggaggaaaaggcacacaaagaaactgggaaaggagaagctgccccagggccgcaatcctcagccccagcccagaggccccagctcaagtcctggtggtgccaacccagtgatgaagaggagggtgaggtcaaggctttgggggcagctgagaaggatggagaagctgagtgtcctccctgcatccccccaccaagtgccttcctgaaggcctgggtgtattggccaggagaggacacagaggaagaggaagatgaggaagaagatgaggacagtgactctggatcagatgaggaagagggagaagctgaggcttcctcttccactcctgctacaggtgtcttcttgaagtcctgggtctatcagccaggagaggacacagaggaggaggaagatgaggacagtgatacaggatcagccgaggatgaaagagaagctgagacttctgcttccacaccccctgcaagtgctttcttgaaggcctgggtgtatcggccaggagaggacacggaggaggaggaagatgaggatgtggatagtgaggataaggaagatgattcagaagcagccttgggagaagctgagtcagacccacatccctcccacccggaccagagggcccacttcaggggctggggatatcgacctggaaaagagacagaggaagaggaagctgctgaggactggggagaagctgagccctgccccttccgagtggccatctatgtacctggagagaagccaccgcctccctgggctcctcctaggctgcccctccgactgcaaaggcggctcaagcgcccagaaacccctactcatgatccggaccctgagactcccctaaaggccagaaaggtaggtgctgagagcccagattctattttttttttttttttaattgagttggagtcttgggctgtcacccaggctggagtgcagcggcatgatcttggctcactgccaacctctgccgcccaagttcaggcgattctcgtgcctcagcctccagagtatctgggattacaggcgcatgacaccacacccagctaattttttttgtatttttagtagagacgggggttttgccatg[133 bp omitted]gctgggggccgagacttctgggtccctgtatgttgcagagggttgcatgtcatctccatggagaaggctgtgtacgctgtcacgcaatcccttgtaagaggccaggcccctgggggaggagggagcagctgtggctcacagcagccccaggaaaccacctcttccttcagtgagtcagatagatagagaatcccgtgacagtgacaggcaagtgactagccagatagaaagcatttttgtgtaataactaatttttgtttgcttctctctctctcttccccgccctccccatccggattcccgtggctgtgtgcatctcctgcctgtgtccccatgtctgcccgcaggtgcgcttctccgagaaggtcactgtccatttcctggctgtctgggcagggccggcccaggccgcccgccagggcccctgggagcagcttgctcgggatcgcagccgcttcgcacgccgcatcacccaggcccaggaggagctgagcccctgcctcacccctgctgcccgggccagagcctgggcacgcctcaggaacccacctttagcccccatccctgccctcacccagaccttgccttcctcctctgtcccttcgtccccagtccagaccacgcccttgagccaagctgtggccacaccttcccgctcgtctgctgctgcagcggctgccctggacctcagtgggaggcgtggctgagaccaactggtttgcctataatttattaactatttattttttctaagtgtgggtttatataaggaataaagccttttgatttgtagcgagcagcgtctgtatgtgtcagaaactgacagcattctacttacaggtccctgagggagctgggaagagaatagcataaaacaaagcacttcaatggcggataaaccgcttttcctcaaatttgctaccactcatcctgaggcttcttttgaacctaacagtgcagggaccagccccacagggtcggtgggcttctccctgtgtgcggcgacgagagagtgtagaaataaagatacaagacaaagagataaaagaaaagacagctgggcccgggggattactaccaccaatgcgcggagaccagtagtggccccgaatgtctggctgcgctgatatttactggatacaaagcaaaaggggcagggtaaggagtgtgagtcatctccaatgattgataaggtcacacgagtcacgtttccaccggacagggggcccctccctgtttggcagcccaggtggagagagagaggagacagcttatgccattatttctgcatttcagagacttttagtacttttactgattttgctactgctatctagagggcagagccaggtgcacagagtggaacaggaaagtgaaacaggagcgtgaccgctgaagcacagcatcacagggagccggttaggcctccggataactgtgggccagcttgactaatgtcaggccctccacaagaggtagaggagcagagtcttctctaaactcccgcagggaaagggagactccctttcctggtccgctaagtagcgggtgtttttccttgacactgaggctaccgctagaccatggtccacttggcaacgggcgtcttcccagatgctggcgttaccgctagaccaaggagcccttctgctggccctgtccgggcataacagaagcctcgcactcttgtcttgtggtcacttctcactatgtctcctcagctcctatctctgtatggcctggtttttcctaggttatgattatagagcgaggattattataatattgggataaagagtaattgctacaaactaatgattaatgatattcatatataatcatatctaagatctatatctggtataattattcttgttttatattttattatactggaacagctcatgtcctcggtctcttgcctcggcacctgggtgtcttgccgcccacataacagctggtgggttttatagttttttttgttgctttttttgagactgagtctcgctctgttgcccaggctgaagtgcagtggtgcaatctcagctcaccacaacctctgcctcccaggttcaagtgattctcctgcttcagcctcccgagtagctgggactagaggtgtgcgccaccacgcctggctaatttttgtatttttagtagagacagggtttcactatgttggccaggctggtctcaaactcctgaccttgtgatccacctgccttggcctcccaaaatgctgagataacaggcgtgagccaatgcacccggcctatgtatttttgtttgtttgtttgagatggagtctcgctgtgtcacccaggctggaatgcggtggcacgatctctgcttactgcaacctccgcctcctgggttcaagcgattctcctgtctt[226 bp omitted]ttgggacaattatcaccacccccccaagggagctggagaattgagtcacggatccctaaaaggaggcagaattgtctgtgccttgctggaccattaaggctcaatctctacaggcctttacattctcctccgttgctttgataccagtgggtatcgaggtccccaagcccgggtgggacctccccctcagccagtgttcaggctcttgacacagtcatgaaaatgaattcaaggacgagttggaaaagagtgaaaatacaggatttattgcaaaggggaaagtccacactcatgaaaggggactcgagagaatcacgtgcaaggggggttgaggctgctaccgttatgggttttttgtttgtttgtttgttttttaaagatggagtcttgttctgtccagcccaggctggagtgtagtgacacgatctcagctcactgcaacctccacctcctgggttcaaacaattctcctaccttagcttcccaagcagctgggactgcaggcgccaccacacctggctaattttttgtatttttagtagagacagggtttctccatgttggccaggctggtctcaaagtcctgacctcaagtgatccacctgcctcagcctctcaaagtgctgggattacagacgtgagccaccacgctggccctttttggatttttttaaccaaggggtaaaatactcatgagcattcctggaaaaagatggagatttctcagaactgtggtgccacccatctttacaccaaatatgggtgttcctgggaccgtcatgatgctggtgggtgtgtgactgtgttgatgaacatataatgaggtcctacgtgaaaccgaggtcagacccagtgccatattgggtctagtcggacttagcctacttggcccacgccctggtttttcaggatcttatcagcccatagcttctgtagctatttcaagtttcctgttgctggtctggtcttgtgaaactgctgcctggaattttctaatctcctgcaaccaccctgtatgattgctgttgcagcctgattttacatttataagccctgtgtccataggcctagtttccttatctgtaagctgactaacaattgtacatatcttatgggattgtaaggccccaaaggagttaaaacaatgctcatgaaataaatgctataatacggtaattattctatataccgttattcttttttttttttttttttttttcctgatacggagtctcactctgctgcccaggctggggtgcagtggtgggctctcggctcactgcaacctccacttcccaggttaaaacaattctcctggatcagcctcccaagaagctgggactacaggtgtgcgccaccacttccagctaattttttttttttttatggagtttcactcttgttacacaggctggagtgcaatggcacgatctcagcacaccagcaacctccgcctcctgggttcaagcgattctcctgcctcagcctcctgagcagttgggattacaggcgtgagccatcacgcccagctaagttttgtatttttagtagagaaggagtttcaccatgttggtggtcaggagtttgagactcctgacctcatgatccgcccacctcagtctcccaaaatgctgggattatgggcatgagccactatgcccacctctacctctaatttttaatttttttttttttttttgagaccgagtctctctgtgtcacccaggctggagtgcagtggcgtgatctcggctcactacaaccccctgggttcaagcaattctcctgcctcggcctccctagtacctgggattatatgcgtgcgctaccacgcagggctaatttttgtattaatctacctctagaccttcacagaatgcaggctcctctcatcctcctaacctaatggcctttcattagctttacaaaagcagcttagttaaactagaaatcctagcactttgggtggccgaggtagatggatcacttgaggtcaggtttttgtttgtttgtttgttttgtttgtttattttgaggcagagtcttgctctgtcgcccaggctggagtgcaatggcaggatcttggctccctgcaacctccgcctcccgagttcaagtgattctcctgcctc[133 bp omitted]ctcctgccatataatcctttcatttccccaaggcaaccaagcctaattccacctaattaaaaacctttgtatgagtgctacctgctgcctgaggatcccaaccctgaggcctcttgctcagctagttgctcctgattcttcagatgtagtgtgaaaattcctttttttggtggggggatagagtcgcattctgttgcccaggctggagtgcagtggcacgatcgggtcactgcaacctccgcttcccagattcaagcaattctcgtgcctcggccaccggagtagctgggattacaggcatgcgccaccatgcccagctaatttttgtatttttagtagagacggggtttgccatatcggcgaggctggtctcgaactcctgacctcaagtgatccttccgcc[134 bp omitted]gattcaagtgtttcttctgcctcagtctcctgaatagctgggattacaggtgcctgccaccacgcccagctaatttttgtacttttagtagagacggggtttcacatgttggccaggctggtctcgatctcctgacttcaggtgatgcaccagcttcagcctgccaaagtgttgggattacaggcgtgagccaccttgcccggtcagtgttggttattaaggtggtgcaaaagaaggcatgtcggggcccttcctccaaatgaggaggcacagaagctggcaagggtatggtattttattgagttattcaacagccagcttctaattgaaactggacaagcagatgctgaaggcctggagcgggctaaatggaaagcagaagtccatggtgaatgtgtctgggcccactcggccgaactggagcaccagatgttcttctgagaagtgaatcaggaacaaagccttagcctgactctctcatctcccagcttcgagaactgagactttttttttttttttttcttttttttttttttttgagacagagtcttgctctgtcgcccaggctggagtgcagtgacctgatcttggctcactgcaacctccacctcccaggttcaagcagttcttctgcctcagcctcccaagtagctaggattacaggcatgtgccaccacgtccggctaatttttttttttttttttttttttgagatggagtctcgctctgttgcccaggctggagagcagtggcgcgatctcggctcactgcaagctccgcctcccgggttcacaccattctcctgcctcagcctcctgattagctgggactacaggtgaccaccactacacccagctaattttttctgtgtttttagtagagacgg[135 bp omitted]tttcaccatgttggccaggctgttcttgaactcctgacctcagatgatccacccacctcggtctcccaaagtgctaggattataagcgggagctaccgcgccaggccgagaatggagacttttaagaggctgagcggtgcccttactaagccagaaaccctgagggtgtgtaaactacaattcccaataggctttgcaatagggtggcatctgccctgcctagaaaaacgctcaagtgatgatgggagatgtagttcccttccgttcacaccctaacccccaccccacctggcccggctaaactggtttccaggagctcacggtgtttgggatccacgatttggaagttcttcaccgaagcccgagtgactcgaccatggaaattgagcgtgtagacaccgttctccttgtcccacgacggggttttgttgtgcaacaaaagcaacccttgtttgtccccacgttggtaacgactcagtagcgactcctgttcctagaaggtaaagaaggggctgtggttttctcagaggctttcgaaactccatcttgaacaggggcgactccatcttgaacaggggcgactccatcttgaacaggggctgggtaaaatgaggatgagacctgctgggctgcgttcccaggaggttaggcattcttagtcacaggatgagacaggagtttgacaggactggtatcacaatgttagaaatgcttgttccccggtgcagtaaagaaatagcacttgagcataaatttaatttcctcagcaaggccattttttaactttctgcagaaagggtacactcaccaggagttttgccatgagagtacactgaacaaaggagacagggtcatttataacctggcgcatccaccctactgccgtgtagggtttccattggctggaacgggacctcacgttctgtatttgtcccaattggctagcaacttagaactttttaaaagagggaaaagcagaagaatacaaagtaaggaggaagtaacttgtggaatgttgagaaaggtaaaaacaccttcaaataaggaagaggaacaggctatgacctaatgcttgcttggaccggtacaagcatgccagggcaaatatttagggtaaattgtgggagctaaaaacgtaaagtacactgatttctttattatggctaacagatatttaagaatgtta[181 bp omitted]gcatggtagcgggcgcctgtagtcccagctactcaggaggc[137 bp omitted]gaagcaggaaccctcagttctgggaattgcccacccctttcccagaaaattaatgaataatccacctcgtttagcatataatcaagaaataaccataaaaatagccaaccagctggcctcaaggctgctttgcctatggagtagccattcttttatttcttctctaataaacttgctttcacttgactctacggactggccccaaattctttcttgcctgagatccaagaaccctctcttggagtctggatcagacccctttttggtaagtttgttaacctaccatcaaaccttttttctccagatgcaaatgttttgagtctctagtcttttactccctgagacatggaaggctaacaaagtccttcaggcttcatgtgacacctgcaacccactggcctcctcttcctcctcttcttcttcctcctctgggatctaggaggaccggccccagccccttctccattgacccagagattcctgatgtcagggactcacatttagtggctggacattgattcgctggttctggctgttggttcctgggagaatcacagtcattttccgaggccccaggtatcctaagacgttgggctcctgggggtattacattccagttggcctggttccttcttctgactatcctaccccattctctcatccccaggacactcacataacacacagcccccagctcctgtctgatccgggcagtattcctggttaaatgctcccggtcaggattcaccccattgtcaaagatggtgaacttggtgctgaagacattggatctgctccaggaagggaatggatagaataaaaatactaagtgttactctttgagtaagtgtcactcatcgcatcgactcttcccatcaatcccctatgtctaagactatgtccgaatgtctaagaatcatgttcctggctgggcacaggggctcacacctgtaatcccagcacttcaggaggcagaggcaggaggatagcttgagcctgggcaaaatggcaaaactccttctctacaaaaaatagaaaaattagttgggcgtggcagtttgtgtctatggtcccagctctcaagaggctgaggtgggaggatcacctgagccccagaggtcaagcctccaatgagccgtgatcttgccactgcactccagcctgggtgacagaatgaaaccctgtctctaaataaatatataaataaataaaaataaataattaaataaatgaggccgggtacggtggctcacacctgtaatcccagcactttgggaggccaaggcgggtggatcatctgtggttgggagttcaagaccagcctgacagacatggagaaaccccgtctctactaaaaatacaaaattagccaggcgtggtggtgcatgcctgtaatcccagctactcaggaggctgaggcaggagaattgcttgaacctgggaggcggaggttgtagtgagccgagattacgccatcgcactccagcctgggcaacaaaagtgaaactctgtctcaataataataataataattaaataaatgaaacaaccatgtttccagcatccatggtcccaggccccctcatttcttgggtgagccatgtactttatgtagcctccctattttatttaaagggccctttaggaaccctcttttttttttttttttttttttttttctgttgcccaagctggagtgcagtggctcaatcttagcttaccaagacctctgcctcctgggatcaagtgattctcctgcatcagcctcccaagtagctgggattacaggttcacgccactatgcctggctaatttttgtatttttggtagagacggggtttcaccatgttggccaggctggtctcaagctcctgacctcaagtgatcctcccgcctctgcctcccaaagtgctgagattataggcgtgagccacctcgccactccctctacctttttggatgcaataattcacacattccaggcctcttttcccacagaaagttaggaatcccagtcccttgcctgtcaaggagtcaaatgccttaaatgccagcctacgttccaaacccttcagttcttctggtccctgagcaggtggaaggtatgctctgtggcctgctgggaaatggagtccccctgtccctaagctccctgctacctgctcctcaccacatgtcagagctctacccacctgactttgcccacgaaattgtccccgtcccgagataggtgtgtaggatccagggagatgaggtaattagaagttttgctccttcttctctttcgcccagccaggaggaagcgctatggatgagaggaacagtccattagaatggacttctggatgctgggtgtggtggctcatgcctgtaatccctgcactttgggaggctgcggcgggcagatcacttgaggacaggagttcgagaccagcctggccaacatggtgaaaccccgtctctactaaaaataaaaaaaattagccaggcgtggtagtgcgtgcctatagtcccagctagtagggaggctaaggcaggagaattgcttgaacccagggggcagaggttgcagtgagctgagatcgcaccactgcactccagcctgggcaatagactgagactccatctcaaaacaaaaataaaaaataatgaaagaaaaatggacttctggaagctggttagagccaggggtccaaagacaaggaaacgtcatgtcccatgatagaggagccagtgatggcacaacaagcttctcaagacttactgggaggccgggcacagtggctcatgcctgtaatcccagcactttgggaggcc[134 bp omitted]gagacaggagaatagcgtgaacctgggaggcggagcttgcagtgagccgagatcgcgccactgcactgggcgacagagcaagactacgtctcaaaaaaaaaaaaaaaagacttactgggaaatgtggttctcactgagggaagccatcagctgggtcctgaatggaagcttcctatcttaatatctcctcctcattccttctgcctatgggtccagagttgaagcttagcccaggaagggtctggctttggagaatggggagcaccctcacttgcaatattgcagcaggactttggtaggcgtttcaccaagaaaaatgggtttggttggctctgagtagggcaaaaaacctctttctagggggagagaggataccccgaggagaggagaccatacttgcagggtaaaggccagaaagactagattgagagaagtggggcttggatctggaaagacaaaccaggggagggacctggttgctgggggcaggatttatctcaggattgagtgaggcctgatagcttatagcaagaaaggctcagtgagggagggtccagactatttttttttttttgacacaagatctccacctcctggactcaagccattttccctcagcctcagcctcccaagtagctgggactacaggtgggcaccaccaggcctggctaattttttttttttttttgtagagacagggttccaccttgctgcccaagctgatctggaacttgtcagctcaaatgatccacctgccttggcctccaaaatgctgagattacaagcgtgaaccaccgtgcccggccttttttttttttttttgagatggagtttcgctctttcacccaggctggagtgcagtggtgtgagatctcagctcattgcaacctccgccttcgagtttcaagcattctcctgcctcagcctcctgagtagctgggattacaggcgcccacaaccacgcctggctaacttttgtattttttagtagagacgatgtttcgccttgttggccaggctggtctcgaactcctgaccttgtgatctgcacgcctcggcctcccaaagtgctaggattacaagtgtgagccaccgcgcccagcccttttttttttttttttttttttttttttttttatgcagagtctaactctgtcgcccaggctggagtgcagtagcgtgatcacatctcactgcagccttgaactcccaggctcaagcaatcctctcacctcagcctcccgagtagcttggactacaggcacataccaccatgcccaaccaattttgtattttttgtaaagacggggttttgccatgttgttcaggctggtcttttttgtgtttgttggttggttttttgttttttgagatggagtcttcctctgtcgcctaggctggagtgcagtgatgcaatctcggctcactgcaacctccgcttcccaggttcaagcgattctcctgtctcagcctcctgagtagctgggactacaggcgcctgccaccactcccggctaatttttgtatttttagtggagacggggtttcaccatattggtcaggctggtcttgaactccggacctcaggtgatccacccgcttcagcctcccaaagtgctgggattataggcgtgagccactgtgcccagccccaggctggtcttgacctagctcagaaaggagtgggattttgcctgggaggtgggggcttactcccaaagctgttgggctggcttactgcacctgcaggctgtcagaggtctccaggtagaggtagtagagggggaacaagcccttgtccacgccgtgcttgtcacgggtgaggtagcactgcatcatggtgcccgggagcgctggccgcagcacgtaggcttccatgtcctcctccagcccagggcagggggagcggattgccaaggaggcttcgtgcctcatatggtcgctgtccgtgccaccctcgcctttcagggccttggacaactcttcgttgtgtgctgctgaggagttcgtccctgtagactcagaggcctctctcttcttttccaagtcttcttcctagcccaggcaccaaatttaaagtcgagggacaaccaccggcccagccttgcttactactgattgaccatcccagccctagggtcccgcccttgcccatccacattttctgcttattggtcaaaaatctcattcagtccacccagtcacgccctcctctgttgactggccagtctattcgctttcctctgcagccacacgcattccacctgctgattggaaaattcctttctgaaagcaaggcccattccgttaaaatggctgttagtttgatctagataacataatacagcccagatctaccctcaagagaaaccatctactgcactttcaccaacaccaaagtgagtgccagttggcccttttcttttattttttaagacagagtttcgctctgtcgcccaggctggagtgcagtgactcgatctcggttcactgcaacctctgcctcccaggttcaagcaattctcctgcctcagcctcccaagtagctaggattacaggctttcgccaccacgcccagctaatttttgtatttttagtagagacggggcttcaccaagttggccaagctggtctggaactcctgacctcaggtgatctgcctgcctcggccttccaaagtgctgggattacaggcgtgagtcaccgttcctggcctgcaactggcccttttcgatcagtgttctgccctttctgaagctcgctgtctttccatggctgcacctatttttttttttttttggacagtctcactctgtctcccgggctggagtgcaatctcagctcactgcaacctccgcctcccaggttcaagtgattctcctgcctcagcctcctgagtagttgggattactggcgtgcgccaccacacctggctaatttttgtattttactagagacagggtttcaccacg[137 bp omitted]tgatttgatgaatggtacacacacacacatgcacgcacgcacgcacgcacgcacacacacaagtctctgccagcttaatcaccaccaggaaaaagagcttctgattgggtggcagaattttagccccaccctcaccagaggtccgaggctagccctcttcttccaatatcctgagtgattgtgcattttcctaccttttggaaggccaagttttcatatacacagtcaccatccattccagggtttggtcccatattgggtgacttgtgtgcatctcccatatcctgggagtcactctcaccctctgcacgggtccctaatgtggggaaaagcaagagagatcagattgttactgtgtctgtgtagaaagaagtagacataggagactccattttgttctgtactaagacaaattcttctgccttgggatgctgttaatctataaccttacccccaaccccgtgctctctgaaacatgtgctgtgtccactcagggttaaatggattaagggcggtgcaagatgtgctttgttaaacagatgcttgaaggcagcatgctcctaaagagtcatcaccactccctaatctcaagtacccagggacacaaacaccgcggaagggcgcagggacctctgcctaggaaagccaggtattgtccaagatttctccccatgtgatagtctgaaatatggcctcgtgggaagggaaagacctgaccgtcccccagcccgacacccgtaaagggtctgtgctgaggaggattagtataagaggaaggcatgcctcttgcagttgagacaagaggaaggcatctgtctcctgcccgtccctgggcaatggaatgtctcggtataaaacccgattgtacgttccatctactgagatagggaaaaaccgccttcgggctggaggtgggacatgcgggcagcaatactgctttgtaaagcattgagatgtttatgtgtatgcatatctaaaagcacagcacttgattctttaccttgtctatgatgcaaagacctttgttcacgtgtttgtctgctgaccctctccccactattgtcttgtgaccctgacacatccccctctcggagaaacacccacaaatgatcaataaatactaagggaactcagaggctggcgggatcctccatatgctgaacgctggttccctgggtccccttatttctttctctatactttgtctctgtgtctttttcttttccaagtctctcgttccacctaacgaacccacaggtgtggaggggcaacccaccccttcacctaaaggatgaaagaagcctggactaagctcaggacagctggatcccaggagtgtgggacaccatcatcagtgctagccagagatggccagaactcctgggttctcagtccctactcatgactcagcgccctcacttgcaacaacctcctcctcctccaggtgcacggaagtctacaagggccagagtttctgattaccctggatctaaggacagggaggggttagggtctttccttttccttatctcagacaaagcatcacagagactgaagatggggggatggagtttggggtgataataattctgtcattgaaatcattggccatctcatgaaaataaaaggaaacgtcaccacaatggaatattataagggaataaaaaggaatgaag[225 bp omitted]gggaggctgaggcaggagaatggtgtgaacccgggaggcggagcttgcagtgagccgagattgtgccactgcactccagcctgggcaacagggcgagactccgtctcaaaaaaaaaaaaaaaatttgttaggtgggccaggggcggtggctcatgcctgtaatcccagcactttgggaggcggaggtgggcggatcacgaggtcagtagttcaaaatcagcctggccaacatagtgaaaccggtctctactaaaaatacaaaaattagcagggcgtggcagcgtgcacctgcagttccagctactcaggaggctgaggcaggagaatcgcttaaacccagccaggcagaggttgcagtgagccgagatcgtgccactgcgctccagcctgaagggggcctgcccctccacacccgtgggtatttctcgcaaggtggagacgagcggctgagagaagaaagaagacacagagacaaagtatagaggaagaaaagtgggcccaggggaccagtgctccgcaagtgaggacccgcaccagcgctgatctctgagttccctcagtatttattgatcactatctttactatcttggtgaggggaatttggtgtgactatagggtgatggtggggagagggtcagcaggaaaacatgtgaacaaaagactctgtgtcataaataagtttaaggaaaggtgctgtgcctggatgtgcacataggctggatttatgtttaactttacataaacatcccagtgcagtaaagagcagtattgccgccatgatgtctcgcctccagccataaggtggttttctcctatctcagaatagaatgtatggtcggttttacactgagtcattccatttccagagacgtgcaggagacagatgcctccttcttatcttaaccgcatggaggcctttctctctcactaatcctcctcagcacagaccctttacgggtgtcgggctgggggaccgtcaggtctttcccttcccacgaggccatatctcaggctgtctcagtcggggaaatcctggacaatgcccaggcttccttgggcaggggtccctgcagccttccacagtgtgttatgtttctggttaatagagaatggagaatggcaatgactttcacaaagcatactgcctgcaaaaccatttttaccaaagcacatcctgcccagccctaaatcccttaaaacttgagtcaatataacacatgtttctgtgagcacagggttgggacaagagttgcagattaacagcatctcaaagcagaacagtttttctttttttttttgggggggg[137 bp omitted]aaccggctaattttttgtattttc[148 bp omitted]tatgtcttcctttttctacatagacaaagtaacgatctgatctctctttcttttccccacacagcctaggtgacagagtgagactccgtctcaaaaaaaaaaaaaatcattaggtgaatgaggtgaatgaagacacacggtggctcacacccgtaatcccagcactttgggaagccaaggtgagaggatcacttgagcccaggagttcaagaccagcct[139 bp omitted]aaccctgtctctactaaaaaacacaaaaaattagccgagcatggtggcacgcgcctgtaaccccagctactcgggaggctgaggcaggagaatcgcttgaacccagaaggcagaggttgcagtgagctgagatcgcgccattgcattccagcctgggagacagagcaagactctgcctcaagaaaaaaaaaaaaaaaggaattgaagaaagaagccacatacaaaagaccacatatgtatacgattccatttgtgtgaaatgtacagaatagccaaatctaagaagacagtggaggttggtggttgccaagggctggggtaaatggaaaaggggtgactgctaattgatgcactatttctttctttcttttttttttccttgagacaaagtctcgctctttcaccctggctggaatgcagtagcctgatctcagtttactgcaacctctgtctcctgggttcaagcaattcttccacctcagcctccccagcagctaggattacaggtgcatgccaccacgcccagctaatttttgtatttttagtagagactgggtttcaccatg[139 bp omitted]attgattgtggtgacggttgcagaattatataaatatagttagcttctcgtatcctacaggctccacatccccactgctgacccaaaatattcaggaaagaaattgaaaaacaacaagatgacaataaataacagaaccaattttttttttctttgagacagagtattgctctgtcacccaggctggagtacagtggcatgatctcggctcactgcaacctcggcctcctgggttcaagtgactctcttgccttggcctccggagtatctgggattacaagcctgcacccccttgcctggctaatttttgtatttttagtagagacatggtttcgtcacgttggccaggctcgtctcaaattcctggactgaagtgaccaaccagcctcagcctcccaaagtgctggaattacaggcactttatttttaaaaatttttttaaataacatataacagctatttacgggccaggcatgatggtttatgcctgtaatcccagcactttgggaggctgaggtgggtggatcatgaggtcaggagtttaagaccagtccggccagcatggtgaaaccccatctttactaaaaatacaaaaattagctgggcgtggtgatgcgcacctgtagtcccagctacttgggaggctgaggcaggagaatagcttgaacctaggaggcggaggttgcagtgagccaagatcacgccactgcactccagcctaggcgacagagtgagactccctcccaacaacaacagcaacaaatatttacattgcatttatactgtattaggtattataagttatctagagatgacttacagtatatggggggatgttcatagtttatatgcaaattttacaccattttatataagggactttggcgtctgcggatcttggtatctgtggggttcctggaacacatcacctgcagataccgaggggcgaccgtgtactggaaaccatggaattgtgaactttaaatgggtgacttgtatggtttgtgaattatacttcagtgaagctgctgcctaagaaaggggaagatttgctgcatgaaccaggagatcccaggtttcaccccaatgtcccctaaattaccaggtcgttggtgggcttgccaacccttgcgtcggattctcggagactgtttaaaaggtgggggagagacggaaccattctccacggagacttcctccaattctgcatcggaattgtctgggagccaggataagaaaggggactggagaccgagattcctgaacactgaggaaggaaggaggggagagttggatttctggatgctgcaggaggaggcggctcaggacctgaactccttggtgtgaggaaggagtgggtgcggtcctgagctcctgagtattttggacagatggattgaggcaccagactcctgggttttagtggggacggagttctggggtctaggaggtcggtggactcgcaaatacctgcttctgtccgcggtgtcgggaggccgcgctcgcccctgccgtctccaccacagctcacggtgcccagggcactgtggatgccagagggcagatgtgcctctgacactttcttccggaggaaagggttcccaaggcctgggagaaggttcagcgagcccatgaaaacgatctacaaattccggtcctcaac[142 bp omitted]gaaacaccgtctctactaaaaacacaaaattagccgggcttggtggcgcatgcctgtaatcacagctactcgggaggctgaggcaggagaatcgcttgaacccgggagacggaggttgcggtgagccgatatcctgccattgtactccagctttggcaacaagagctaaactccgtctcaaaaaagaaaaaaaaatcaccctgtttcgcggaccgcccaaaccttgagacccaggtcccaaactgcatcctaagcctcaaacaagcacagccctgccgctggattgttgcgggctccgcacgtaaagaatctcgcgccaggctctcgtaatgagaccgcgccccgccccggacccctagaccccgtctccgcaatcccgggtttggggtgggggtcccggctttcccaggctccaccaccgagctctgccaagcccaatcatcacattctcttgcccctttcccctgctagttgtaccatgccccgcccctgcgctctgtagccctgccccgaacccctccctcacaggtcctgccgcggggggcccccacaagcctctcccctgggcgcccacaggccctgttctaaagctctcctgggccaaggcccgcccccatccactgccaagtccccaccctaaggctccaccccttcatccactaggccccgcccacagactcccacaggcccctcccctccaggcgaacgcccccaggggtctttggtcacctctgtcacctaaaaggcgctcctcccgcagacaagagcgccaaagccacggggaagcgtcaggattggcctgaaccatgaggagctcctggcgcttctgtcgctgcttcttttcaaacagccgccgctggggagatgggagaggtgggtgtccgggacaggaaccagatgggaagacagaagtgaggtggggcctggggcaagggctcgcatcggcgcgagagttcgtgaaccccttcctccactggggcccacacgtccaggccctcagttcttcagcagctcctcccttattccaccgttggactcagatccaagagtcctgacaccctgtcctctcatcccccaggacccaggagtcctgccttctagaagccttgttccttagaaattcatcacaagggtttgtttgcttctttagaacccccaattcctattttcttttctttttcctttcttactttttttttttctttttgagacagagtctggctctatcgcccaggctggagtgcagtaccacgatctccgctcactgcagcctccgcctcccggattcaaacgattctcctgcctcagcctcccgagtagctgggattacaggcgcctgccaccacacctggctaattttttgtgtgttagtagagacggggtttcgccgtgttggccaggcttgtcttgaactcctgacctcaagtgatccgcccacctcagcatcccaaagtgctgtgattacagccgtgagctgccctgcccggccccaaattcctattttctcatttctcagtgggaaaactcaaggatgagagacagccaacacgggctgggagtcctagagcaagacctggtggagaggcccctggggaggcacagaaggcggaagagttggagtggtgagattcctgggcacaatacctgctgttccagcttctgcagcctcatagcagcgagctcatgccccaggatgctgagagagacacaggcccatggtgacagtgcacagggaacctcggttgcccaagagagtccctccttcccccatcctgcccctatctcagcttgggttctgggcacctgtgaggtcacaggaggtgcagaacctgagcctgctccaccagttatagggccctttctcctggcactggcccacagaagccgggacccagagatcccaggtccctcctgtctcaggattcaggagtctggggcccccaaccccttctctttcagacccagaagtctgcaccctagccccatcccttcaggacacaggagtccaggtccccagccccttcctgcaaggccgatggtgctgaacctgcaaacatggttatgaagccagagccgagtgcacggggtccccagccctttccacctccacccctacccatctgtttccctactcactctctcatcaatgtgtcattatcctgagacattctgcagaagcaagaatgaggagtcaggatcagaaccaacatcccaatggatcctgcccaccagcacctaatctttagccttatttatttatttatttatttatttatttatgtatttagagacagctgagcctcgctctgtcgcccaggctgcagtgcagtggcgccatctcggccactgcaacctccacctcctgggttcaagcgattctcctgcctcagcctcccgagtagctgggactacaggcgtccgctattctgcctaatttttttgtattttagtagataccggttttcactatgttggccaggctggtgccggactcctgacctcaggtgatctgcccgccttggccttccaaagtgctaggattacaggcatgagccacagtgcccggcctgatccttacctttaaatttgcttccggacccaggcagcccgaatcccagcacccactcctgtcgggatctagtagcctgtttccagcttcccacgggggtccgcaagtccgcttctctctcccccaaatatctaattctccagcacccaggcatcagaactcaggactgtgcacttcaaacacccagcccccagcggcctagaactccactgcccacctgcctgggatccgggagacttgttctcctcaccaggtgcctggagaggctgctcacattgatgcctcggtaccttgcctctctggccaatctctaaacatacctgatcctctctttggaagctggggacctaatctcgggatatctgcgaaatagggaggagaagaaagacggctcagagggagggaggattccctctgggacctgaactggtccactcccttctgaccctccactctccacttccaacaaagtaacgaactcggtcactgatgcagccaggcaaccctgctccgggggttctga[148 bp omitted]cccgtctctactaaaaaaaaatatatatatatacacaaaaaaattagccgggcgttgtggcgggcgggcgcctgtagtcccagctactcgggaggctgaggcaggagaatggcgtgaacccgggaggcggagctcgcagtgagctgagatcgcgccactgcactccagcctgtgtgacagaggtagacaccgtctcaaaaaaaaaaaaaaaaagagagagagagagcgggagaccagagacctcgcgg[264 bp omitted]gcttcctgagtagctgggattacaggcatgcgcaaccacgcctggctaatttgtatttttagtggaggcgaggtttctccatgttggccaggctggtctcaaacccttgacctcaggtgatctgcctgcctcagcctcccaaagtgctgggattacaggagtgaacccccaagcccggcttgacatccgtctctttaaaaaacaacaacaacaaagtgtgagaagtgtgaaagacagaacgttaaaaaaaaaaaaaggctaaaaaagaattaaagatttaaatatttgtattaaaaatttaaaaaatatacattagccaggcatggtagtgtggcctgtggtcccatctacttgggaggctgacgcgggaggattgcttgggcctgggaggtagaggctgcagtgagaagtgattgcgccactgcactccaacctgggtgacagagcaaaccctgtctcgaataataagaagaagaagaaagaaactcataagaaaggctatgcaattgctaccgcgctataacttccaggcacttcgtggggcgaaaataaatgggaaaactacagctcccatgaggcgaaggggccacgatgcccgcggaagttatttttcccccggccggcagggagttgtagttatctttgaaagccttctctctcttttggcataggcgggaaatgtggcgtcaagaggctgggattccgagaaagaagcgaggctttcacgaaaatgcgagcggcttcggcaaggggcggggccgctggacgtggatgaaagctacagagccagcgtggaccaatcagacctctttggggcggggcctctgtggataagtgggcgtggtctaggggggaagtcaccaagaacgcaccggaggtccttgcccgccctggaaaacgccctctgcggtgaaggagaggtgagaggccagggttcccatactcttgggtcctagggaggatgggggccagagggctggaaaactgggtcccggaggaggatgcactgggtgccagtactttaggtcctgggaaaagaggaggctgggaccctggactcttgggtctgggggaggaggcggccgagatcccggattcctgagtgtgagagaggagcgtgttgggagccaggacccctgggtctgagggcccagactcctgtgtcggaggaagggaaggccggaggcctggaatcctggggcctgggtaacaaaatgcttgtgtcttgattcttggaagtgggggcggcgctgggggcccgaactcctggttccaggggaggaagaggcttgggacagacattatgcattatccagccctccatcccccacagaccacactgccatgcctccctctgggccccgaggaaccctccttctgttgccgctgctgctgctgctcctgcttcgcgccgtgctggctgtccccctggagcgaggggcgcccaacaaggaggagacccctgcgactgagagtcccgtgagtggccctgccctgctatccagccaggtgtttgcagtggtactacagctcctgcagaccccggtgcccgtagggcggatgctccagtgacttcctggccctacagttgtagcttgttttttgcccaccattcctcccagcagcaggggtttgacttggtgaaaaactggaggtccctgactctgaggtgtggaaaatctgcatcacgccccaactaaacgtctgtttttttaagattctctccacccaagaaggaatttgaaaacaaacaaacaaaactacatttcccagtagcaccatgttgctagttcccagtagcagttgatgttggctagctggggtattctgacttcatggtgctcttgggagttgtagtttaaattacagaagggcgggtgaactgcttgtttattaattcctacatgtgtttatcaaacccaataaaagctttggtcttaagggatttggaactttggagatcctgaaggtcagtgagtgtcttgtggtccgaatcttcctatagctccccataaggataggctggtcaggccaggcgcagtggctcatgcctgtaatcctagcactttgggaggccgagacaggcggatcacttgaggtcaggagttcaagaccagcctggccaacatggcaaaaccccatctctaccaaaaatgcagaaattagctgggcgtggtggctcacgcctataatcccagctactctgggaggctgaggcacgaattctcgtgctggaaccaagagaggtggaggttgcagtgagccaaggtcacgccattgcactccagcctgggcaacagagctgagactctgttttctgagactgtctcaaaaaacaaagaatgggctagtcattaccccctggaacggatcattgcatgttcctggtccccacgctgcaagttaggcctctattctgtgaaatccttgcagacccaggaaggctttgttgagtcccatttcttttcttccattccacatgtttcctgagcaccttctatgagccgggcatagtgttgcctatgtgttgcatagttgttagggcccagccatgtgcatgccccatgcccatggactatccctgctcactgggagatggaagacaaagggcagggctctatgagagtgaacaccaggggtgacagtcagggaggaagggaggcgtgagttgagttctttctttctttctcgctctgtcaccaggctggagtgcagtggtgcaatcttggctcactgcaacctctgcctcccaggttcaggtgattctcctgcctcagcctcccgagtagctgggactacaggcgcacaccaccacgcccatctaatttttgtatttttagtagagacggagtttcaccatgttggccaggatggtctcgatctcttgacctcttgatctgcctgcctcggcctcccaaagtggtgggattacaggcatgagccacctcattttttcttttcctttttcttttttttttttttttttatttttgctgtgtcacccaagctggagtgcagtggtgcaatcactgcaatctccatctcccagactcaagcgatcctcctgcctcagcctctggagtagctgggactgcaggcatgtgccaccatgcctagctaattttttttgtatttttgatagagacagggtgtcattatactgcccaggctagtctcgaactcctgagttcaagtgatttgcccgcctcggcctcccaaagtgctgggataataggtgtgagccactgagttctgaactggagagatatgttaagtcaagagcaaggaagagaggaagtgaggggaagagcattccaggcagagggaacagcatgagcaaaggccacttggtaggagaaagcagagcaagttgaggacgtcaaggaggctgctgtggctggagcagggagagtgagagggaggggagagggggattatgtggatcatgtgggatcttgtgagactaggtaaagaggtaaagaatgtatatatatatatatatgtttaatagacagggtcttgtgctggtgcccaggctgaagcgcagtggcaggatcatacctcactgcagccttgaactcctgggctcaagtgatcctcctacctcagcctcccaaagcactgggattacaggcatgagctaccatgcctggccttctctcttttgtaattttatttatttattttttccaacttatcttatttgcttttcaccacaactctgggaggcagaggatatattgcctattttataaatagtaagagcatagaaggcccagggagagtaaagtcccacccagctacgcatgacgggggtgggactaggaggcctgggacttttgtctgtgttgttcacagtgcctggcatatgataggggcctggtgaatgtttgttgaatgaatgaatgcatgcatgggcgggtgggtagatggatgggcagttggatggatgggcgggtggatggatgggtgggtggatgagtggatggatggatggatgggtggttggatggatgggcgggtggatggatgggcgggtggatggatgggtgggtggatgagtggatggatggatgggtgggtggatggatcgatgggtgggtggatggatggatgagtggatggatgggcgggtggatggatgggtgggtggatgagtggatggatggatggacgggtggttggatggatgggcgggtggatggatgggtgggtggatgagtggatggatggatgggtgggtggatggatggatgggtgggtggatggatggatgagtggatggatgggcgggtggatggatgggtgggtggatgagtggatggatggatggatagatggatggatggatggataggtgggtggatggatgggcaggtggatgagtggatggatggatggatgagtggatggatggatggatggatggatgggtgggtggatggatggatgggtggatggatggatggatgggtgggtgggtggatggatggatgagtggatggatgggtggatggatggatggatgatgggtggatagatgggtgggtaggatgtatgtatggatgggtgggtgggatgtatggatggatgggtgggtggatgcatggatgaatgggtggatgcatggatggatggatggttggatggatggataaaagtatgattcacagcttcccaacaagtcatgtccactctgagcacccactctgggcagtattgggctgggtgttcactgatgtgattttcatttcatctttgctgcatatgtgggaaaaggtaaaaactgagtcccttgtcagctgccccagggagcaggccatagcagtaacaggagtgagggtggggatggggatgggagcaggggctgctatgtctgtccttgttgcctcaggacacaggcctgtactaccaccggtacctccaggaggtcatcgatgtactggagacggatgggcatttccgagagaagctgcaggctgccaatgcggaggacatcaaggtgcggctgggggagtgggggctgtgggaggggtacgtgctgggagggcagagttcaggggaggactggtttctttttttttttttttgagacggagtcttgctctgtcacccaggctggagtgcgatggtgcgatctcagctcactgcacctccaccccgcaggttcaagcagttctcctgcctc[134 bp omitted]gcttcccaaagtgttgggattacaggcatgagccaccatgcctgaccatactggtttcttcaaaggggccacatggctccagctgtgcctgtatttgaaaatcaccaaagtaagactcagggagaagttgcttcttggggtcacaagctgggaagagctttggggaacacagaatacgtgtttagtgcagagtcccgtgggcaggctttcagtcgcagctccgccgcttaccagctatggggcctcccctcaccgtgcctcagtttccccacctgtaaaatgggagacatcatagaacctgctgcacagttcggatttggattttccaagggaaggattttggggtttggattttccaaaggaagatgtgtaaagggtttggaagagcatggtgacactccttagcaagtgttgtgggagggctgcgtcaacagaatgctcctatggtgccttctacagaggaagaattcaaaataagggaggtgctggtgtcccttacatcaccatgaactcccatatcaggcctctaggagcaccatcattgtccccatttcactgagtaggacactgaaccctcgtatcaggatctgtccttctcatggacctgggtctcaccaccatgcacggctaattttgtattgtttctagag[131 bp omitted]gggcagcacaggtgggcagggccttgaatgccaggctgacgggctgggagctgtccttcctggagactctgaggagctgggggactataagcagggaaggggcagtataagactggggcatgagaaagcttataagaagcttccagagaagacagagagcaggcccccaggctgaccagggtctcctctcctgtcagagcgggaagctgagccgagagctggactttgtcagccaccacgtccgcaccaagctggatgagctcaagcgacaggaggtgtcacggctgcggatgctgctcaaggccaagatggacgccgagcaggatcccagtgagcaggggcagggcgggagggacaggcagggaggggtggggaagggtggcctcactcccggcctccaggtggttgtgtgctaggcaggtgaggcctccctccccgctgcgaaatgtgctgaaatgtgcgtgggagattgccccagtgttcctcccagcatgatttaatattaacattacaatgttgtttgtttatattctgtttccatttgttgtttttaaaaatctttatcatgggctgggcacagtggcccacggctgtaatcccagtactttgggaggctgaggcaagcaggtcacctgaggtcgggaattggagactatctggccaacatggtgaaaccccatatctgctaaaaatactaaattagccgggcatggtggtgcacgcctgtaatcctagctgctcaggaggctaaggcaggagaattggttgaacccgggaggcggaggttgtagtgagccgagatcgcaccattgcactccagcctggacaacagagtgaaactctgactcaaaaaaaaaaaaaaaaaattgtcatttaaaattctggtagaggccgggtgcagtggctcacgcctgcaattccaacactttttgaggcaggagaatcactcgagcccagaagttcaaaaccagcctgggcaacatagcaagacccctgtctctataaaaaatattaaaaaataagctgggcatggtaatgcatgcctgtggtcccacctccttaggaagctgaggtgggaggatcgttgagcctgggatgtcaaggctatagtgagccatgactgcgccactgtactccagcctgggcgacagaacaagatcccatctcaaaaaaaaaaagttgaaagaacttcaaacttttagaaaagttgtaagagtagtacagaaaactcccaaacacccctgacctggcttctctagttaacatttgctccatttgctttgtcactcacgtttgggacttcaccacagtcaccatctcatcacccttacacatttcagtgtgatactcttgcataagtacagcgataaaatc[134 bp omitted]tcctggattcacgccattcttgtgcctcagcctcccaagtagctgggactacaggcgcccgccaccatgcccagctaattttttgtatttttagtagagacggaatt[131 bp omitted]atcttgctctgtctcccaggctgcactacagtggcgcgatctcggctcactgcaacctccgcctcctgggttcaagcaattctcctgcctcagcctcccaagtagctgggattacaggtgtgtgccaccacacctggctaattttgtatttttagtagatacttgattttgccatgttggccaggctggtcttgaactcctgacttcaagtgatcctcctgtctcggccttccaaagtgctgggattacaggcctgagccaccagccttggcccccatcttaaggtctttaatgtaatcccatccgccaggaccccttagcccggaaaggtcacgcattcacaggttccggggatcaggatgtggatatcttttagggcaccagtatccagctgccacaacacccaggctcttcccgtccctcctctgcccagagcctgcccccggcaccccagtgccctcaggcccgcattcatgttcctcttgtctgctcggagcctgggtggaccttggccacacccgcccaaccctgcccttcccgtatgcaccctgaccttcttgcgtcagcatttttagaaattgctggcgtgcagccttgggacctttgtccgttcgccccgctctcccgtgacattctttctcagggctctttgcctggtccatggaccttccatctcccctggaatgtcacctcctcagggtgtcaccgccccggctgtcctgtgtgaaggagcctctgtgttatttgtgtccttggtattcctttgttcatcccttggtcgcctgttctctgtctctctagactgggtgct[136 bp omitted]gcctcctgagtatctgggattacaggtgcccgccaccatacctggctaattttgtatctttagtagagacagggtttcaccatgttggccaggctggtctcaaactcctgacctcaggtgatccacccgcctcagcctcccaaattgctgagattacaggcatgagccaccccgcctggcctccaagagtcagaattctgtcatcatttgattcctgctgtgtccatagcggccggcgctgggtcagcctggaatagcggctcaacacacgtccctggcacaaataatgaatttgagattcagtttgtacctgtgtcctgcacacctgtcactcctctgggctcagccagggccggagctgcctccactgcagcctaggtctcccaaattctagctgcccgtgtgtgtgtgtgtgtgtgtgtgtgtgtgtgtgtgtgtgtgtgtgtgtgtctttctgcccacttgaccaaggggtgtgtgtgtgtgtgtgtgtgtgtgtgtgtgtgtgtgtgtgtctttctccccacctaaccaagggccactggaggccagggccaggctgattcattttgggtccagcattgcacagcgcaggcctgggcccctagaagcctcgggagacatgcgtgcggtaagtgtgtgttggcagcgtgtgcgctgtcctttcctgcctggaaaccctaccccttcctgactacttggaaactcccatatgagggaggctgcacttgtttgctgaggccgctgtaaccaagtaccactgaccaggtgcttcagcaacagaacttgactgtctcatggcctgcagtcagagtccaaagtgaaagtattggcagggttggttccttctggggctatgagggaggatctgtaccaggcccctctccttggcttgcagatggccgtcttctcactgcattttcacaccatctttcctctctgtgtgcctggcccaaatttctccttccattattattttttattaattattattattattatttttttttttttccaagacagagttttgctctcgttgcccaggctggagtgcggtggcgcgatctcagctcactgcaacctctgcctcccaggttcaagcgattctcctgcctcagactcctaagtagctgggattacaagcacgcgccaccacgcctggataattttgtatttttagtacagatggagttttgccatgttgggcaggctggtttcgaattcctgacctcaggtgatccacccgccttggcctcccaaagtgctaggattacaggtgtgagccaccgcgcccggcctattattattttgagacagggtttcacttctatcctccaggctagagtgcagtggtgcgatctcggctcactgcatcctccccctcccacgctcaagtgattctcctgccttagcctcctgagcagctgggactacaggcacacaccactgcacacagctaatttttatattttttgtagagatggggtttcaccatgttgcccacgctggtctcgaatgcctgagcccaagtgatcctcccacctcagtctcccaaagtgctgggattacaggcatgagccactgtgcccagtcataaatttctgccttttataaggtcaccaatcatgttggattagggcccacagtaatgacctcatcttaacctgattccctctgtaaagacctagtctccaaatcaggtcacattctgaggtactggggcttaggacttcaacatagaaacttaggagcgtgcaatttaacccctaagattggttgatgctttatcaaaaattttgatgtttttcttttgtttgtatgtatgtatttattttatttatttatttttcagacggagtctcactctgtcaccaggctggtgcagtggcgtgatctcggctcactgcaacctccgcctcccaggttccagtgattcccctgcctcagcctcccaagtagctggggctacaggtgcgcaccaccatgcccagctaattttttatgtttttattagagatggggtttcacc[143 bp omitted]cacacctgtaatcacaacactttgggaggccgaggtgggtggatcacctgaggtcaggagttcaagaccagcctggccaacatggtgaaaccctgtttctgtttctactaaaaatacaaaaattagccgagtgtggtggcatgcacctgtagtcccagttactcggggctgaggcaggaggattgcttgagcctgggaggcggaggttgcagcgagccgagatcctgccactgcagagtgaaaccctgtctcaaaaaaaaaaaaaaagaaggaaaagaaaaaaagaaatggttgagtgtcatggtttttggatgtccaatggctggttcccatccttgctctgccacttgctagctggtaccctagaccagtcacaacccctcaaggggtctcagttttcacattcataaaatggggataatcataaaacccttgttgtcaggattttgtggaaagtgaatgaattaatacagttaaagtgcttagggcatggcctggcatctagtaagtaggcactacatgttagtttttattatggttattattgtaagcatcagactcagtcgtgggatcacctcctccaggaagccttccctgattgccccaggttcaagctgtcttctgggcttccctagtgctgtccgtgacttctttggatcatgtctggcccaagatgggggttctgaaagaacatgccctcaggtgttggactcttccctctcttccagatgtacaggtggatcatctgaatctcctgaaacagtttgaacacctggaccctcagaaccagcatacattcgaggcccgcgacctggagctgctgatccagacggtaatgggagtgggtccggaggcagaggattgagggtagctttgcggaaggggagaaggggacagagtcccagacgtgagccagctcaccattcctgctggtgttctctgaggttggaggctggtagagggctgagtcgtttcttttcttttctttttttttttttttttgagacgaaatctcgctgttttcccccaggctggagtgcaatggcacaatctcggctcactgcaacctccgcctcccgggttcaagcgattctcctgcctcagcctcccgagtagctaggattacaggtgcctgccgtcacgcccagaaaatttttgtatttttagtagagacagggtttcaccatgttggccaggctggtctcgaactcctgacctcaggtgatccacccgcctcagcctcccaaagtgctgggattacaagtgtcagccaccgcacccagctcttcttatagtgatacccaccgtaatctagcaggccatcatcttaactaattacatctgcaaacactctatttccaaataagatcacattctgagattccaggtggacatgaatttgggagtgtggggggagtatactgttcaacctggtattgttaactccattttacagaggtggaaactgaggcacaaagaggctgagtaacttgcccagtgtcacagagcttatgagatttggtcacaaagcaaagcctagatttgaacgctgggcaaaatagttagaaacctcttgttctttttttggtttatttttactttttttttttttttttttacctgagacagcgtcttgctctgatgcccaggctggagtgcagtggcatgatcacagctcactgcagcctcaacctcctgggctcaagcaatcctcccacctgaccctcctgagtagctgggaccagaggtgcaagccaccgcaccaggctaattttaaaaatttttagtagacacaaggtctcgctgtgttatgtgagttagtcttgaactcccgggctcgagtgatcctcccaccctagcctcccaaagtgctaggattccaggcgtgacccacctctcctagtctgaccttatgttcttggccacctagctgtacctgaaatacataaatactaagttcaccacatatgttgttcctatttacttattcctccaagatctggagattgtggaggacttgaaagaggtgggttgaagttgctattgtataaccgtcccaatctgttttgaataaagagaagaaagtgtgttatggggcaggagcagtcatggaaaccaaaaagggcgacatcaggctgtgcgcgatggctcacgcctataatcccagcactttgggaggctgacgtgggcggatcacctgaggtcaggagtttgagaccagcctggccaacatggtgaaacctcgtttctactaaaaatacaaaaatcagctgggcctggtgacacatgcctataatcccagctactcgaaaggccgaggcaggagaatcacttgaacccggaagacagaggttgaagtgaggcagtgagcagagattgtgccaccgcactccagcctgggcaacagagcaagactccctctcaaaaaaaaaaaaaaaaaaagggacattaggacacgagacgtaagaaagacaggtagaggctggggctgccctcagccaggttcagggccaagggcctgccatttacaggctggaattgggggctgggcagagggggcagaggggaatgaccctgtgcctttccccaggccacccgggaccttgcccagtacgacgcagcccatcatgaagagttcaagcgctacgagatgcttaaggaacacgagagacggcgttatctggagtcactgggagaggagcagagaaaggaggcggagaggaagctggaagagcaacagcgccggcaccgcgagcaccctaaagtcaacgtgcctgtgaggaccccatttgtgcccatccactccctaccacatccagttcaaacgcaagacaagaaagcagttaaagaactacaattcccaggggcccttgaggcaaaaaaactccctgttactgtacctggctgccccagggtctgctgggagttgtagttttcttagttttcttgcttgagggagatgatgtttgttggatgagggtaaagggatatttggttttatcccatggcatccagacttcttgctcatgagctcctggctctcccctccacagggcagccaagcccagttgaaggaggtgtgggaggagctggatggactggaccccaacaggtttaaccccaagaccttcttcatactgcatggtaaggtggggagggagttccagagccaggatgaaccctagattctgacccttctaggacctgaatgctaagaggggtgtgtctgtcccaggagggcttagtcaggcccaagagccaagcctatgtcccctggttgaccagacagccctgcctctcccgactacaaggctaggatctgcatggaagggttgggcctcttttctagcaaacaccagacctcggggttctaaggacagctggtgtcctctgtaagcaaaccaggcttggctaggcctgggccctctgcccacagcagcccaggagaagccctggtccactctgggaaccctgtcgctaggagtgggttgttccctaagaaccaggcctccagaagcctggaaaaccctttctctttttctttttcctttttttttttttttttgagatggagtcttgctctgttgcccaggctggagtgcagtggcatgacctcggctcactgcaaccccctgccctccgcctcccgggttcaagtgattctcctgcctcagcctcccgagtagctgggattacaggcatgcaccaccatgcccggctaacttttgtatttttagtagagatggggtttcaccatgttggccaggctggtctcgaactcccaacctcgtgtgatctgccccctcagcatcccaaagtgctaggattacaggcgtgagtcactgcgcccggcctcgaaagccctttctctatggtggatcaaaggcacactcccctcagtctgtctcttcctgtctggaaatgtggcctggggttgccaagccccctcaggtatgccaagcaccctgtcccagaatctgtagccggtcagataagcttagcaaggcctgactcattcattcagcaaacctttcctaagttccctctaaggaccaagctttgtcaagaccccgtggatacaactgtaaacaaaacaaagtacctccccctcagagccagtgatcaggcacacagatcataccatactttagtaactccacgagactgtacagtatgagaggtgctagcattttacgtaagctgccaattaaattaacgtaccattgaaaacaagatgcgtcctgggctgggtgtagtggctcatgtctgtaatcccagcactttggtaggccaaggtggaagatggcttgagcccaggaatttaagaccagcctggacaacaaagtgagaccctgtctctatttaaaaaaaaaaaatagaccaggcgtggtggctcacgcctataatcccagcattttgggaggttgaggtgggaggatcacctgaggtcaggagttcaagaccagcctggccaacatggtgaaaccccatctccacaaaaataccaaaattagctgggcatgatcgtgagtgcctgtaatcccagctactcaggaggctgaggtgggagaatcacttgaacccgggaggcagagtttgcagtgagccaagatcgtgccattgcactgcagcctgggtgacagagcaacactccatctcaaaaaaacaaagaaaaaaataaaaattaaaagttaaataaataaagatacatccctatttcaggggtgataaaatagaagaacacaaaagtgcatctcagaatcaacgaaggttctaggccgggtgtggtggctcacgcctgtaatcccaacactttgggaggcctaggcgggtgggtcccttgaggccaggagttggagaccagcctggccaacatggcaaaacccagtctctactaaaaatacaaaaattaaaaaacaaaacaaaaattagccaggcatggtagtgctcacctatagtcccagctactcaggaggctgaggtaggagaatcgcttgaacccgggaggcggaaggcgggggttgcaatgagctgagatcacaccactgcactccagcctgggcaacagagtgagactctgtctcaaaaagcaatagaaagtaaaaaagaattagaagattctgtaatggggtctcaggtagtgacgtgtactacctcgcagccttgaccacccaggttcaagtgatcctccccctcagcctcccaagtatctgggaccacaggcacgtaccactatgcctggctaatttttttaatttttagtaaaggcaaggttttaccatgttgcccaggctggtctcaaactcctttgctcaagcgatccacctatcttggcctcccgaagtgctggggttacaagcatgagccatcccaccgggcaccaccccccgtgttttgttttgttttttttttgagacaggatcttgctatgttgcccaggctggagtcaaactccaggcctcaaacaatcctcctgcctcagtcacctgagtagctgagactgcaggtgtgtgccactgcgcccagctttaaagatgtttaattgtacagttcaatagtattaagtatatttacactgtcatgcaaccaattctgagagctcttcatctcgcacaaccgaaaccgtatccattaaaccactcgccctccccttctttcccctgctctctagcaaccaccattctattttctgtctctatgattttgactattttaggtacttcatgcaagtagaatcttttggtatttgtcgtgtgtgtgtgtgtgtgtgtgtgtgtgtttggcttatttcacttagcataatggtgaggaactgaagttttcattctactggatattaatttctatttcaattgccccatgtggctagtgg[145 bp omitted]cacaaacccatctctacaaataaaatacaaaaattagctgggtgtggtggcgtgcatctgtagtcccagctccttgggaggcagaggtgggaggatcacttgagtccaggaattcaaggctgcagtgagctatgatcataccagtgccctccagcctgggcaacagagtgaaaccctgtctctaaaaaatagaaaataggctgggctcagtggctcacgcctgtagtcccagcactttcggaggcca[132 bp omitted]gaggcaggagaatcacttaaaccctggaggtggaggttgcagtgagctgagatcatgccactgcactccagcctggcaacagagcgagactctgtctcaaaaataaataaacaaataaataggcccggcgcagtggcttacccctataatcccagcactttgcgaagccaaggcggctggatcccttgagaccaggagttcaagaccagcctgggcaacatggcaaaaccccatctctatgaaaacaaatacaaaaattagctgggtgtggtggcgtgcatctgtagtcccagctacttgggaggctgaggtgggaggatcacttgagccgaggagttcaaggcttcagtgagctacgatcacaccattgcactccagcctgggtgacagagtgagaccctgtctctaaaaaataaaaaaataaaaaccttatttaatctttttaatcaggcagtccctacagaccagaataggttcagagcaactccctatacctttttttatttttcattttttttatttttagagatggggcttccctttgtcacccaggctggagtgcagtggcgtgatcatggctcactgcaacccagacctcctgggctcaagtgattcttccacctcaacccttagagtagctgggatcataggtgcacaccaccatgcccagccaatttttaaattttttttttctttttgaggcagagtcttgctctgttgcccaggctggagtgcaatggcatgatcttggcacactgcaacccccgcctcccaggttcaagctattctcctgcctcagcctcctgagtagctggggttacaggcacttggcattatgcctggctaatttttgtatttttgtagagacggggtttt[148 bp omitted]catcttttctaagctggtctcgaacttaatgtgctcaaatgatcttgccttagccttccaaagtactgggattacaggcatgagcccctaaatttggcccctacattttctttaatcttaatcaatttacatttaaacagcccatgtggctagcggctactgtactggacagcgcagatccagagtttaggcagagaagagacccccaggcctgagccctgggccacactagcatgtggaggtcaggaagaggatggagccgtcaaaggaggtggaggggcagccagagaggacagaatcatgttctggaagccaagggcagaaagtcaagtcagatgcaggtggaaattaaccactggatttgcaagatgagggttcctggcctcctcctcaggaggaaggttgtgcttgtctgagggagccgaggaaggagggccggtggtgaggacaggaagtgtggctgaccgagcctgaagccctgcagctgtggggtctacgttggtaggagaggctcccctcacaactggagtcggcactggcctggttgtctgggaggcagaggtccctgataaccctggagctgactctgtgtccagagcactgaatgccagggccagagaatcctgcatgacagtgacccaagcatgtttcctcgaaccctccctttgatctattccattctcaaccccctggtcgctaggcagtggccctagcaacgggtctagtggggtactaaagcctgggggccaccgttccaccgcgggagacccgtagttacctgtcctctgataacagaccccacatcagcccaaaatttcttcaccagggaccttacacatcccgtcctcggtcccctgagataccttgctatcctcttcccttcagatatcaacagtgatggtgtcctggatgagcaggagctggaggcactcttcaccaaggaggtgagcatcttggaagcctcgggcacctggagggacgcccaaatcagccacttgtttcctcctgcagtccccttaaatccccctggatgggagctcagtgaaaactacaactcccatcagcccctggggcaaaaacggctcccaggagtggtagcgtgcccaaaggactgctgggagttgaagttgtcgggaatgagctcgctggggacctctcaatgctgtctgcctctcgcttgctcctgcagctggagaaagtgtacgacccaaagaatgaggaggacgacatgcgggagatggaggaggagcgactgcgcatgcgggagcatgtgatgaagaatgtgaggtgggggccaggcgggggagaggacgggcccccagctctgtcactcacccttatctggctccccaggtggacaccaaccaggaccgcctcgtgaccctggaggagttcctcgcatccactcagaggaaggagtttggggacaccggggagggctgggaggtgagaacatgggggatactcggggtcctgaacctctctctcttctagccatgacctttctttcagaatcttaggccccttctctttctctctgggtccccgtccattctcctgggtcactgcatctctatctctgggtctctgttttcccctgtctctaggactcttatttatttatttatttatttatttatttatttatttattctgagacggagtctcactccatcgcccaggctgcagtgcagtggcacgatctcggctcactgcagcctccacctcccaggttcaagcaattctcctggctcatcctcttgagtagctgggattataggtgcgtgccaccacacccagctgatttttgtatttttagtagaggcaggatttcaccatgttggccaggctggtctcaaactcctgacctcaggttatccacccaccttggcctcccaaagtgctgggattagaggtgtgatttttttttttttttttttttttctgaaacagggtcttgctctgtcgcgtaggctggagcccagtggtgggatctcggctcactgcaacctccgcctcttggattcaagcgatcctcccatctcagcctcatgagtagctgggattacaggcgtgagccaccatgcctggctaatttttgtattttttgtagagatggggttttgccatatcggccaggctgctctagaactgctggactcaagcgatccacctgacctggcctccctaagtggtgggattacaggcatgcaccaccgcaccacacctagctaatttttgtattttttggtagagacagggttttgcatgttggccaggctgctctgaaactcctggactcaagctatccacccttctcagcctcccaaagtgctgggattacccaggctggagtgcaggggtgttatcatggcccactgcagcctcaaactcctgtcctcaagtgatcctcctgcctgagcctccctattagctgggactacaggcacatgccagcatgcctagctaatctagctcattcttttatttatttattaatattttttgagacagggtctcctgtcacccaggctggagtgcagtggtgtaatcatagttcactgcagccttgaattcctgggctcaggtgatcctccttccttagcctcctgagtaactgggactacaggcacataccaccatgcccagctaatctaggtctctgttttatttatttatttatttgtttgtttatttttcaatacagagttttgctcttgttgcccaggctgtagtgcaatggtgcattctcagctcattgcaacctccacctcccaggttcaagcaattctcctgcctcagcctcctgagtagctgggattatatgcatgtaccaccatgccctgctcattttgtatttttagtagagacggggtttctccatgttggtcaggctcatctcaaactactgacctcaggtgagccacccacctcggcctccgaaagtgctgggattacaggtgtgagccatggtgcctggcctatttctatatatttttcaagatgcccagccaattttctgtagagacagggtctcgctccgttgcccaggctgaccttgaactcctggcgtcaagtgatccttcccactttcgcctcccaaagtcctgggattacaggtgggagccatggtgcccggccttgtctctcggtctttatcccactcccacctcccacttgggcttctttgcccacccacatggccctggcctcccagcctcctctacacctcccccattggcacaaccctctccaacatgggtgggccgaggttggacctgtgcccctgatggcccctgtgcctgccctgcagacagtggagatgcaccctgcctacaccgaggaagagctgaggcgctttgaagaggagctggctgcccgggaggcagagctgaatgccaaggcccagcgcctcagccaggagacagaggctctagggcggtcccagggccgcctggaggcccagaagagagagctgcagcaggtgacagcgggggaagctgcttccatccactgaatctctggctgcccgtgtccgtgtccccatgggtgtccagaagctgggaaggcctgtggccaccatgttaatcactgggggagcctcaagtattcaccgccatcttgagtaagggcagacgttttcccgtctctgacggctctgtggctgccatgtgagataagggcattaaggctgtaagtgaggagggaaaggcccaggagggggagaaaggcagactcagccagggatgggtgagggtttccctgtcccaaagcaagacccaagctgtgactggagggagaactggatccttgactattattaagcccgactgtcaatgaaagagagaaactgaggcccacggagaaggggttggccgtgaccacttagcaggctgctgtgaagtctccgtttggggactgaggcctgagcacttgcaatgccagcatcacaccctcttgtctgtgtgaccccccacctcccacaggctgtgctgcacatggagcagcggaagcagcagcagcagcagcagcaaggccacaaggccccggctgcccaccctgaggggcagctcaagttccacccagacacaggtgctggccctagtccagggaggaggggctgcagggctggacccctgggtctgaggttggaggggctgggcctggactcccagatctgagggaagagggactgggggcccagactcccagatctgagggaagagggactgggggtccggactcctgggtctgagggaggaggggctgggggctgggacccctgggtgtgagggaggaggggctgggacccctgggtgtgagtgaggaggggctgggggctggacccctgggtgtgagggaggaggggctgggggctggacccctgggtgtgagggaggaggggctgggcctctggggtcctgggggaggaggggttcggatgtcctgtgccaccattccctccctccatttccagacgatgtacctgtcccagctccagccggtgaccagaaggaggtggacacttcagaaaagaaacttctcgagcggctccctgaggttgaggtgccccagcatctgtgatcctccgggaccccagccctcaggattcctgatgctccaaggcgactgatgggcgctggatgaagtggcacagtcagcttccctgggggctggtgtcatgttgggctcctggggcgggggcacggcctggcatttcacgcattgctgccaccccaggtccacctgtctccactttcacagcctccaagtctgtggctcttcccttctgtcctccgaggggcttgccttctctcgtgtccagtgaggtgctcagtgatcggcttaacttagagaagcccgccccctccccttctccgtctgtcccaagagggtctgctctgagcctgcgttcctaggtggctcggcctcagctgcctgggttgtggccgccctagcatcctgtatgcccacagctactggaatccccgctgctgctccgggccaagcttctggttgattaatgagggcatggggtggtccctcaagaccttcccctaccttttgtggaaccagtgatgcctcaaagacagtgtcccctccacagctgggtgccaggggcaggggatcctcagtatagccggtgaaccctgataccaggagcctgggcctccctgaacccctggcttccagccatctcatcgccagcctcctcctggacctcttggcccccagccccttccccacacagccccagaagggtcccagagctgaccccactccaggacctaggcccagcccctcagcctcatctggagcccctgaagaccagtcccacccacctttctggcctcatctgacactgctccgcatcctgctgtgtgtcctgttccatgttccggttccatccaaatacactttctggaacaaatgcatggctccatgcctgtgtatctggactggtccctccaaaacgctattgccacgtcacctgccggagtcctcatctttgaagactggattcaagcatcacttctgagaggctcaatcctggtatttttccatctgcccctgatgagtctgcagccttcactcagggtcccttcagccacaaggacagaaaacccaaacctgggattaagcaattttttttttttttttttttgagatggagtcttactctgtcacccaggctggagggcagtggtgtaatctcagctcactgcaacctctgccttttgggatcaagcgattctcctgcctccgcctcccgagtagctgggattacagctgcctgccaccacgcccggccttctaatttttgcattgttttagtagtgatgggggtttcaccatattggccaggctggtcttgaactcctgacatcatgatctgcccaccttagcctcccaaagtgctgggattacaggagtgagccactgcacctggccgggattaagcaacttttaaaagatgaatttggccaggtgctgtggctcacgcctgtaatcccaacacttcgaaaggccaagataggggggatcacttgaggccaggagttcaagaccagcctggtcaacatggcaaaaccccatctctactaaaaatacaaagatgagccgggtgtggtggtgggcacttgtaatcccagctactcgggaggctgaggcaagagaattgcttgatcctgggaggcggaggttgcagcgagccaagattgcaccactgcactccaaccggagtaccagagcaagattccatctcaaaaaaaaaaaaaagaatgtaccaggtatggtggctccacctgtagtcccagcactttagaaggcagaggcggatagatcacgaggtcaggagatggagaccatcccggctaacacggtgaaaccctttctctactaaaaatactaaaaaaattagctgggcgtggtggcaggcacctgtagtcccagctactcaggaggctgaggcaggagaattgcttgaacccaggaggcagaggttgcagtgagccgagatcatgccactgcactccagcctgggtgacagagcgagactctgtctgaaaaaaagaaggctgaggcaagaggatcacttgagcttaggagtttgagaccagcctgggcaacatagcgagaccccgtctcagaaaaagaaaaaaaattagctgggcatggtagtgtgtgcctgtagtctcagctgcttaggaggctggtgtgggaggatcccttgagccctggagtttgaggctgcagtgagccatgatctatcactccactgcactccaggctgggtgacagaatgaggccctgtctctaatagaaaaaagaataaataaaaatgaattatgataaaaaccaagatgtcccaaggcaggatgacttcagggaaccaggttctcgcatcccctagctgtgccaaggataggtttgggggctggaccccccctcatggtcccaaggtagctgcagctgctccagatgtcaccaacagccagtgaaggaagaggccgcattctgttctgggcattgttaagtgggagaaaatctgtccccagagttccctctcctttcagccctctcctcatgttcccttatatcccactggctgtgaggcacaggtcagtgacagctgcagacagatccaccaagctggcatccaccagtggtgatttcatcctcacctgggatggggatgctttccttggaccaagttggggtctggtaaaaagcaagcggggaatatttgtttttgttttgttttgtttttggagacagagtcttgctctgtctcccaggctggagtacgatgacgcgatctcggtttactgcaacctctgcctcctgggttcaagcgattctcctgcctcagtctcctgagtagctgggattacaggtgcccagcacacacccggctaatttttctgtatttttagtagagatggggctttcaccatgttggtcaggctggtcttgagaactcctgacctcaggtgatccccccgcctcggcctcccacagtgttgggattacaggcctgagccaccacgcccggccaggagtatttgtttaaatgaaattctggccaggcacagtggttcatgcctataagctcagcactttggaggccagggatgggcagggtggggggtttcaggagaggatgacaggaggatgactcaagctcagagctcaagaccagcctgagcaacatagcaagacctcatctctaaaaaaaaaaaaaaaaaaaaaaaaaaaattagccgggtgttgtggcatgcacctgtggtcccagctactcaggaggcttaaggacagaagaatcgcttggccacagaaggttaaggctacagtgagccatgaccacgccactgcactccagcctgggagacagggcaagaccctttctcgagaaaaataaataggccgggcacagtggctgatgcctataatcccaacgcttcaggaggccaaggaggaaggatcctttgagcccaggagtttgaggccaacctgggcaatatagggagaccccatctctatgtaaaaaaataaataaatagggccaggcgcagtcactcacaactataatcccagcactttgggaggctgatgtgggcggatcacttgagggcaggaattcaagcccagcctgggcaacgtgaaaccccgtctctacaaaaaaataccaaaattagccgggcgtggtggtgtacacctgtaatcccagctactcagggaggctgaggcacaagaatcacttgaacctgggaggcagaggttgcagtgagccaagatcacactactgtactccagcctgggtgacagagcaagactccatctcaagaaaaaaaaaaaaattagctgggtgtggtggcacatgcctgtagtcccagctacttgggaggctgaggtgaaaggatcgcttgggcctgggaagcggtgattgcaacgctgcacatcagcctgggtgaccaagcgggactctgtctcagaacaaaacaaaacaaaaatacatattcccagatcctggaatgtcctgggaagctatatgtgtgtcatgccctcccagctgcacctgaacaatgagcatagcaaacatcagctgcagcctctctttgcctctctcagaaaatgaggggagttgagcttcagtgacccaatctggaaaacgggcctaaatggtgttctttgaaaggttcatataggcaaagcggtccccaaatgccgaaggagccaagaaaccaaagaatgaggccgacccatctagtttgtcaatacagggtggtttattagggggaaacttagagtgtggtcttcgccaggcatggtggcttatgcctggaatcccagcactttgggaggccgaggcaggtggctcacttggggtcaggagttcgagaccagcctgactgacatggtgaaacttgtctccactaaaaatacaaaaattagccaggtgtggtggtgggcgcctgtaatcccagctactggagaggttgaggcaggagaatcacttgaacccgggaggtggagactgcagtgagccgagctcacgccactgcactccagcctgggctacaaagcaagaccctgtctggaaaaaaaaaaaaaagaagtgtggtcttgggcagcagcaagacagatagatcacaccctgcaacccccagacacagggcttctatctcgaggaaagcatatctgtgctctggaagaaacgcgtaggtggctatgggcgatacatcttgtgatggatgtgacaacatcaaggcttgttctggaggaaaggctggtaagtacgtgtttctacataaagagtaacacatccgttagacatgttggaggcattcccagtttcgggttagtcagaagtcacacggcaggctgggtgcagtggctcatgcctataatgccagcattttgggaggctgaggcaggaagaccgttcgagcccaagagtttgaaaccagcctgagcaacatagtgaaaccccgtctctttttttttttttttgagacagagtctcactcttgttgccggtggctcgatctcggctcactgcaacctccgcctcccgggttcaagtgattctcctgcctcagcctcctgagtaactgggattacaggcgcccaccacgcccagctaatttttgtatttttagtagagacagggtttcgccatgttggccaggccggtctcaaactcctgtcctcaggtgatctgccctcctctgcctcccaaagtgctgggattataggcatgagccaccacgcccagccaaccctgtttctttctttttcttttttttttttttttgatacggagtcttgctgtgtcccccaggctggagtgcaatggcacagtctcggctcactgcaacctccacctcccgggttcaagcaattctcctgcctcagcctcccaagtagctgagattacaaaccccgtctcttaaaaaaggaaaaaaatcacatggcagagtagcattttaaaataaagtcacgaggctgggcgcggtggctcacgcctgtaatctcagcactttgggatgctgaggcaggcgaatcacccgaggtcaggagtctgagaccagcctgacctacgttgagaaaccccgtctctactgaaaatacaaaattacccgggcctggtggcgcatgcctgtaatcccagctgctcaggaggctgaggcaggagaatcgcttgaacccaggaggtggaggttgcggtgagccgagatcacgccattgcactccagcctggacaacaaaagcaaaactccgtcttaaaaaataaataaataaataacattaaactacgtcactcagcctgtgaacaatggctcacgcttataacccagcaatttgggaggccgcagcaggtggatcacttgaggtcacgagttcgagaccagcccggccaacatggtaaaaccgcatttctactaaaaatacaaaattagctgggtgtggtgatgggcgcctgtaatcccagctactcatgaggcaggagaatcgcttgaacccaggaggcggaagttgcagtgagctgaaattgtgtcactgcactccagcctgggtgacagagcaagactccgtccaaaaaaaaaaaaaaaaaaaaagggaccatgttctagtgtaggggtaagtggattgttttggccccaaccccaagaggatcaagggagaccactgcagctgcccgagaaattcttgccctctgacaagaaacaccctatccagtctggggaatttgccagtccaacccctccccttggctcaagattctgggaaatcctaaatagtgtttaccattggccttttatcagctccagtataaatgcgtctggccagacttgctttacaactatgcataatggatagttgggccaggcttggtggctcatgcctagtgctttgggaggccgaggtgggaggatcacttcagcccaagagttggaggccagcctaggcaacatggtgagacaccatctctacaaaaaaaaattttattttctgttttttttttgagacggagtgtggcgctgtcacccaggctggagcaacagagccagactttgtctcaaataaataaataaataaataaaacctgcaaaaaaatttttttaaatgccatttttctttctttctttctttctttttttttttg[135 bp omitted]catgcccggctaattttttgtatttttagtagagatggggtttcactgtgttagccaggatggtcttgatctcctgtcctcgtgatccgaccacctcggcctcccaaagtgctgggattacaagcgtaagccaccgcgcctggccatttttctttttaatcaatcctgccacttgaagattatatggtaagggaaatctgcagtctatacacaatactgagttgctccaagcccttgaggattgtgagggacccagtgttctaattcttgctagagtgtctacctccatgttaccagaggcgagtctgaccgggtactgacatgtgatataccattaagtgtgcagtgggttcttttagcctttcccaaatgtctttccacatggcagcgccccacagcattttctttttcttcttttttctttttcttttttttttttttcttttttttcctgggcaacagagtctcactctgttgcccgggctagagtgcagtggcgtgatctcggctcactgcaagctctgcctcctgggttcaagcgattccagtgcctcagcctcccaagtagctgggattacaggtgcacaccaccacgcccagctaatttttgtatttttagtagagatggggt[145 bp omitted]caggctggagtacagaggtgccatcatagcttactgcagcctcaaccttcccagctcaagcgatcctcccgcttcagcctccctagtagctgggaatacagatgcacaccaccacacctggctaattttttgcaggttggtctcgaactcttgggctcaagagatctgcccgccacagtctcccaaagtgctgggattacaggcatgtgccaccgtgcccggcatattttcttttcagtgtttacctttttgcctcctct[141 bp omitted]aaaccctgtctctactaaaaatacaaaaaattagccaggcgtg[134 bp omitted]tcaaaaaaaaaatatatatatatattatatatatatatttttttttttagaccgggtcttcctctgttgcccaggctggggtgcagtggtgtgatctcggctca[133 bp omitted]cttgatctcctgacctggtgatccacccatcttggcctcccaaagtgctgggattacaggtgtgagccactgtgcctggccgctgagtagtattttgttgaatccactggcagcttaaaggacatttgggcttgagctatgtacagctgctaacacctgtgcactggtttgtgtgcaaacatgttattttttctttctaggacaaatacctgggagtatcaaaattattttttgatatttattattaaatgattttttcttttt[138 bp omitted]cctcctcctcccaggttcaagcaatttacctgcctcagcctcccaagaagctgggattgcaggcgtccgccaccatgcttggctaattattttgtatttttagtagagatgggggtttcaccatgtttgccaggctggtttcgaactcctgaccttaagtgatccgcccaccacggcctcccaaagtgctaggattacaggcatgagccactatgccctgccccctccccccactttttttttttggtagagatggggtcttgctttgttgcccaggctggtctcaaagtcctggcttcaagcattcctcccatttgggcctcccacagtactgggattacaggcgtgaaccaccgtgcctggtcccatttgtgtttctattcagcagtttgtgtaaacttgaagtctgtgaatccatgtgtgacactcaggtcttaattattgtctaccaagtaagagaaagtgacaatatcctgccctgtgtgaagctggccagccagttaggaattatcatgtcccaaccagcctgggaaacttggcaagaccctgccttgataaaaagtttaaaaatcgactggacacagtgtctcatacctataatcccagcactttgggaggctgaggcaggaggattgcttgagcccaggaattggagaccagcctggacaacaaagtgagaccttttctgtacaaaaaattgctgggcatggtggctcatgcaggtaatctcagcactttgggaggccaaggcaggcggatcacctgaggtcaggaattcgaggccagcctggccaacacagtgaaaccccatctctagtaaaaatacaaaaattagtcgggcgtggtagtgggcgcctgtcatcccagctactcgggaggctgaggtaggagaattgcttgaaactgggaggtggaggttgcagtgagccaagattatgccactgcatgatcaccccagcctggatgacagagcgagacttcgtctcaaaaacaaaaaacaaacaacaacagcaacaaaaattagcaggctgggtgcagtggctcatgcttgtaatcccagcactttgggaggccaaggcaggcaaatcgcaaggtcaggagatcgagaccatcctggccaacatggtgaaaccctgtctccactaaaaataaaaaaaattagctgggcatggtggagggcgcctgtggtcccagctactcaggaggctgaggcaggagaatcacttgaaccagggaggcggaggttgcagtgagctgagatcacaccactgcactccagcctggggatagagtgagactccgtctcaaacaaacaaacaaacaaatagcggtaagtggggcacatgcctatactcccagctactcaggaggctgaggcgggaagatagcttgagcccaggagtacaaggctgctgtgagctattatcacgccactgcagtccagctaggtaacagagtgagaccctatctctaaaataattaataaataaaacaaaataattagccaggtgtagtagccagtagctactttgggtcccagctactgtagtcccaggtactagggtggctaaggcaggagctaattccttgagctaaggaatttgaggctgcagtgagctatgattgtgccactgcactccttcctgggcgacagagcgagaccctatatcaataataattataataatacagtatattttacataatagaccatagagctcaatgaatcctcctcacaaccctatgtaggtagatgttatcatgatctctgctttccagaatagaaaagtgaggaccagagagggcgacctcttgtccaaaagcaatacagccaagaaggggcaaggagggttttgaaaccagtcggccaggctctggggctcctaacaagcaaagcagcctggtttctaaaactatagcttctggaagcagccaattcacaggtctttacctcctgactgtgagacctccaaaaaatgaccagggatcttggagtctgtttccccctttgtgaactggggacaatagaagctacttcccaggtctgcggggagaaattaggaacgaagaaggtaaagcgcagagctgaggagctggtctacaggtgctctatacatattagtaataattattaagtttgctgttacaatcctctctctctctgtgaacaacccctaatgatgcgtggctttgagagcaaaaaagtcagggcaaagttttgccacaaagtccagagggcaagacattaaatctaactctcaaggattggtgttggcaagaaagcaaacctctcctccccacgctgtccttaccccgcgtatccgacgagcctaaagtcataggtaagagatctgtagaagcgacgtcaaggtgtggttccctctgtaaggcggagctaaacggtgcattcgcccagcggggaagctagaactaaatgaccgctctgccgactggagccaacgagaatcggcgtaggcgcaatacgggcggaggatggggacccgcccccggggtgggcggggcgtcaggtacttaattcgcgcctggagggaccgaaggtgccgagggctccgcatcgcaaccatggcgctgcgctggggcatcgtgtctgtcggcctcatctccagcgacttcacagccgtgctgcagacgctgcctcgctctgagcaccaggtctgcccgccctccggattctggggaagaggaggcggggggcgggactccagagtctaaaggaggagggagtttagggttcaggactagtgagtgggtcgtcattgcagtgaaacgtctgtttccttgctacctccttctccatctctgttctgcaaacctgtggggaaaagaaagatcagattgttactgtgtctacgtagaaaatgaagacataagaaactccattttgaactgtactaagaaaaattgtttctgctttgagatgctattaacctgtaactttagccccaaccgtgtgctcacagaaacatgtcctgtattgaatcaaagtttaatggatttagggctttgcaggatgtgccttgttaacaatatgtttgcaggcagtatgcttggtaaaagtcatcgccattctccattctctattaaccaggggcacattgcactgcggaaagccgcagggacctctgcccaagaaagcctgggtattgtccagggtttccccccactgagaaagcctgagatatggcctcgtgggaaaggaagaccttacatcccctagcccgacaccagtaaagggtctgtgctgaggaggagtagtgaaagagggaggcctctctgcagttgagataagaggaaggcttctgtctcctgctctccctgggaatggactgtctcagtgtaaagcggaccattcccattccttctattctgagataggagaaaacctacctgtggctggaggcgagatatgctggcagtgatactgctctgttactctttgctacactgagatgtttgtgtaaagtgaaacataaatctagcctacgtgcacatccggtcacagcacctttccttgaacttattcatgatacagattccttttctacatagacacagtaacaatctgatctctctttcttttccccacacaaacctgagtgtcttgaggtttggaaaggccttgatgtaagctactatgaagataatttcaatattgggggatttaataacggctttcccccagatctctctttcccagggcccaaatgtccagcccccgtcatctcttcccccaggaccacgtctccccttcccctggccagagcctcctcctttgcctcccttccacccagtttccacgcctgcctcagcccctcaaatccgattcttgtgcccctccaggtggtggcggtggcggcccgcgatctgagccgtgcgaaggagtttgcacagaaacacgacatccccaaggcctacggctcctatgaggagctggccaaggacccgagcgtgggtgagtggcgagggcgatgggggtgctggccgccgcccctggagcggtgccccctggctgccccctgggagatgcaaggctcctcaggatggtccaatccctttgggttccataaagacctttggctgggaggagaactataaaacgggcttggtctgggactggctgtctagtaggtgttaaactacacttagcgttcgagaccagcctcggcaacgtagcaagacccaatctctacaaaaaataacaataaaaataaattagccaggtatggtggcacgcacctgtaatcccagctactggggaggc[136 bp omitted]cctgtaatcctagcactttgggaggccaaggcgggcagatcatgaggtccggagatggagaccatcctggctaatacggtgaaaccgcatctccactaaaaatacaaaaaattagccgggcatggtggcgggcgcctgtagtcccagctactcgggaggc[131 bp omitted]ttaaaaaagagagcgagaatggcgagaggtaacagccccttcctaaggacagctccctaagggagacaggggtgtgaccgaccacctggtccctgggtgctagggcggggcctcgaagttgtgggcggagctcggctgtctgggtgggcggggctgctgacctcttgacctactcccaccctagaggtggcctacattggcacccagcacccccagcacaaggcggcggtgatgctgtgcttggcggcgggcaaggccgttctgtgcgagaagcccacgggcgtgaacgcggcggaagttcgcgagatggtcgcggaggcccgatcccgagccctcttccttatggaggtgagggcagaggagcccttccaatatccagcgtaaaagtgcttgccattaaatatggttgccagtgcgcggacggggtcagtgcatttgccaggatgtatctgaatctccttggcagcatctattaccgtgaaagccattgcttttggcccttagcaaacacggcaaggcttactgaaattgcttgga[136 bp omitted]cccatctcttctaaaaatacaaaaaattagctgggcgtggtggcgggcgcctgtagtcccagctacttgggaggctgaggcaggagaatggcgtgaacccgggaggcggagcttgcagtcagccaagattgcgccactgcactccagcctgggcaacacagtgagactccgtctcaaacaagaaaaaaaacaaacaaaaaaaaaaacaagaaaaagatgccaagagtgaaagtggcatagaatggcaatggcttagtttgggtggggttccaggtagaggttgaaaggaccaaggaaccccctacaaacctgcagtgcagtggcgcgatctcggctcactgcaacctccacctcccaggttaaagcgattctcctgcctc[225 bp omitted]cttagccttgtaaagtcacacattcacagactccggggatcatcaggtcgtggatatctttgggggcaccagtagcctactgccacaacacccaggctcagagcctgcgcagagcctgcccccggctccccagtgccctcaggcctgtgttcacgctcctctcgactgctccgagcccgggcggacctcggccacatccgtcctgccccgcccttcccccgtgag[269 bp omitted]gtctaacacagtgaaaccccgcctctactaaaaatacaaaaaattagccgggcgtggtggcgggcgcctgtagtcccagctactcgggaggctgaggcaggagaatggcgtgaacccgggaggcggaggttgcagtgagctaagatcccgacactgcactccagcctggacgacaagagcgagactgtctttaaaaaaaaaaaaaaaaaaaaaagaaattgctggagtgcagccttgggacctttgcccattctcccggctctcccgtgacattctttctctgggctctttgcctagtccacggagcttccgtctcccctggaatgtcacctcctcagggtgtcaccgtcccggctgtcctgcgtgaaggaccctccattttatttgtgtccttggtattcctttgttcatcccttggttgcctgttctctgtctctctagactgggtgctccaagaggtagaactctggtttttgttgtcattgttgttgtttttgagacagagtcttgctctgtcgccaggctggagtgcaatggcgtgatctcggctcactgcaacctccgctgcccggctttaagtgattctcctgcctcagcctcccgagtagctgagattacaggcatgcaccaccacgcccggctaatttttgtatttgtagtagagacggggttttgctatgttgtccaggctggtctggaacttctgacctcaggtgatccgcccgccttggcctcccaaagcgctggggttacaggcatgagccacagcgcccagcccccagttccaggagtttttttttgttgttgtcattttgcatttttctacatagatgatgtcatctatgaacaaagagttttatttctaccttctgtatctatatgcctcctttaaggagtttcactaggagatgcacacgtaactcttaaacccactggcctgcatgctctatacctacatctaatctcttcttataaggacaccagtcatattgtcatatt[132 bp omitted]ttctcctgcctcagcttcccgagtagctgggactacaggcgtgcgccatcacgcccagctaaaattttttgtatttttaatagagacggggtttcaccgtgttggccaggctggtctcttgg[132 bp omitted]ggccacaacagttgctttcagaggtactagggagttaaggcttcaacacgtgaattgtgtttggcagggcagaagcgagagggagagagacacaattcatcccataacatggggagactggggcaatggtccagatgaaaaagaacaaaagtcaatagggcacggtggctcatgcctgtaatctcagcactttgggaggctgaggtgggaggactgcttgagcccaggagttcgagaccagcctgggcgacatagtgagaccctatctctattcaaaaaaaaaagaaaaagaagaaaagtcaagagggtcaggagcaagagggatacaacctggggactgatgggctgtgtttggagactgggttgcagtgggtatccccctatgattgggaccccagaagggattagaactggttggttaactcctttccttgtggtctgcaggccatctggacccgcttctttcctgcctccgaggctctgaggtctgttttggcccagggaactctaggagacctccgggtggctcgggcagaatttgggaagaatctcatccacgttccccgggccgtagaccgggcccaggctgggggggccctgctggacatcggcatctactgtgtccagttcacctccatggtctttggagggcagaagccagagaagatttctgtcgtgggaaggcgtcatgaaacaggtaccatctatcctggaatatttcatggtgatgggaatgattctgtctctctgggagcactgaactgaggacaagtctccaagtcaatgagaattagatcagacacctagaggaacaactttccatgaagccagagaggatcagagtcaagactgcaggtgggcactctcctgggactttgctgtgtgatcttagccagcagacttaacatctctgaatcttaattactttactggtaaagtgtcactaatagggttgtcatgggagttaatgaagtaactgctgaggcaaatggcagttaataaatataaaattattattttttgaagttgtctcagtgaatctttgctacaaaaaagactaccccacttggccaggcgtggtggctcacgcctgtaattccagcactttgggaggccgaggtggccagatcacctgaggtcaggagttggagaccaccctggccaatatgatgaaaccccatctctactaaaaatacaaaaattagctaggcattgcggcaggcacctgtaatcccagctatctgggaggctgaggcaggagaatcacttgaacccagggggcggaggttgcagtgagctgagatggcgtcactgtactctagcctgggcgacagagtgagactccatctcaaaaaaaaaaaaagctgccccactttgcagaagaggcccttgccttggcttccactcagctggaaagtatccaagagtgcctgagccacccagatgtgatgcccttcatctttgacctttaaccccaaggagcaagaggcagttcatgcttcattaaagttacattcagccgcaaaa[137 bp omitted]catggtaaaaccctgtctctacgaaaagtgcaaaaaaaattagttgggcgtggtggtgtgcacctatagtccggctactctggaaggtgaggtgggaggatcaattgagcctgggaggcagaggtggcagtgaactgagatggtgccactgcattccagcctggggaacagagccagaccctgtctcctttttgtggagaacagagtctcgctatattgcccaggcaggtctcgaactcctgggctcaagctatcctcccgcctctgcctccccgagagctgggattacaggtgtggccaccgcccccggcaagccagaccctgtctcaaaaaaaaaaaaaaacttagtgacttcaaatagcaatcatttattagcttgtgattctgtgcattggcaaattggggctgggctctgcttgatggttcttctgctggtcttattcctgcagctgcagtcagttggctgttcagctgggactggacagtctggtaggcttcatttatatcttacaggtggcaggcaactgtctgggaagccttgattctcctccacctggcctctccagctggctagataccattcatatcgtggtgtgagaattcctgatgtgcaagcacttttcaggcctctaattacaccatatttgctactggcccattggccaaagcaagttacatggccagctcagttttcagagatgggcaaatagactgtaatttttgtttttttttagatagtatctcactttgccacccagggtagaatatagtggtgtgatcttggcacactgcagcgtcaacctcctaaattcaagcgattctcctccgtaagacccccaagtagctgggcatacagatgtgggccaccacgcctggctatgtttgtttgttttttgtagagatggagtttccccatgttgcccaggctggtctcgacctcctgggctcaagcaatacacacatttggcctcccaaagtgctggggattacaggcatgaaccaccggctttttttttttttttttgagacggggtctcactctgtcacttaggctgagtgcagtggcacaatcattgctcactgcaaccttgacctcccaggctccagggatcctccacctcagcctcctgagtagctaggatcacaggcacaagccaccacacccaactaaattttttattttttgtagagacaaggtctcactatgttgcccaggctggtcttgaactcctggactcaagggatcctcctgcctccacctcccaaagtgctgagattataggtgtgagtcactgtgcacagccaagactgta[136 bp omitted]ctgcctcagcctcccgagtagctgggacgacaggactacaccacgcctggctaattttttgtatctttagtagagacagggtttcaccg[139 bp omitted]cttgcccaaggttccacaggcaggatttggggcctgtgcagtctcagagactctgccctgagagaccctgccctgacccaggacttccctccaggtgtggatgacactgtcacggtgctcctgcagtacccaggggaggtccatggcagcttcacctgcagcatcaccgtgcagctctccaacacggcctccgtgagcggcaccaagggcatggtacaggtgaggcatggcgggcccaagcgctggggatcgtgcccctaaaataggagggggacaaatggcctctggagctagatgagagcttaaccagccaatttcacatcattgctaaagagttcctccttaaccaagccaagaggtgggttctgggcctctaggctctccttacttaggatgaacctattgctctgtcaaatattcttgggcctggctggcacggtggctcacgtctgtaatcccagcactttgggaggccaaggcaggcagatcacctgaggtcaggagttccagaccagcctggacaacatggtgaaacgccatctctactaaaaatacaaaaattagctgggtgtggtggtgggcgcctgtaatcccagctactagggaggctgaggcaggagaattgcttgaatccggaagatggaggttgcagtgagttgagattacgccattacattccagcctgggtgataagagcaaaactccatctcaaaaaaaaaaatatatatatatatatgtatccttgggcctggccggcacggtggtcacacctataatcccagcactttggaggctgaagctggtggatcacttgagccctggaggtcgaggctgcagtgagctgtgattgtgccactggactccagcctgagtgacagagtgagatcctgtctcaaatatctatctttagtcctgaggagaagccagttattatcaaccatgcttagtgggcagttgtgaatttcggaagtgcatccgggggaggatctgggtgttaccaaaggtcagcttaactggtcttcctggggccttgttgctagaaaaaaaaaaaaccctattttatagccaggcatggtgacttacacctgtaatcccagcgtgattgggaggccaaggcaggcagatcacttgagctcaggaattcaagactggcctggccaacatggtgaaaccccgtctctactaaaaaaaacatacaggctgggcgcggtggctcacacctgtaatcccagcactttggcagcccagagcgggtggatcacctgaagtcaggtatttgtgaccagcctgaccaacatgatgaaaccctgtctctactaaaaatgcaaaaattagccaagtgtggtggtgcatgcctgtaatcccagctactcaggaggctgaggcaggagaattgcctgaacccgagaggcggaggttgcagtgacccgagatcgagccattgcactccaggctgggcaacaagagcgaaactccgtctcacaaaaaaaaaaaaaaaaattagtcaggcatggtagtgggcacctgtaatcccagctactcgggaggctgaggcag[136 bp omitted]catggttcacagacacacaaagataagccctcctctctagaccttaagaacaccttgtttctaagctcctaaggttagggagaggtttgctcctggggagacagacaggatttttgtgtcacatcagcgttgctaaggaacaaacttctagcaactagaaatgaaggagggtccaaagctccccggggatggacagggcaagctcttagccaccaggttcaagagggaggcccctgtgcaccacctggcatgttcctggaggcagcctcagcagcaccgttggtgaaggcagcagtgccacttcttctctccctccagctcctcaacccctgctggtgcccgaccgagctggtggtgaagggggagcataaggagttcccgctgcccccagtcccaaaggactgcaattttgacaacggggcaggcatgagttatgaggccaagcacgtctgggagtgcctacgcaagggtaaggatatggatgcggggcaggcgccaggcctggtagggggatgttgggcccctccccacctgctctgtcaccctgctgtttagaactacatctcccaggaggttgcagtgagccgagattgcaccactgcactccagcctgggcaacggaacaagactctcactccaaaaaaagaactatatctctcaggaacccctgcagcatccatctgcctgaaccatgtatattgtgccacatggaattctgggaattgtagttctttgggtcttgggcgcgtgggtaggaggggtccctaactacactctccccacaggtatgaaggaaagtcctgtgattcccctgtcggaaagtgagctcctggctgacatccttgaagaggtgaggaaggccattggagtcaccttcccccaagacaaacgctgatgtatccccgaataaataaagacatcttacatcttcgtggtagtggtttggcagaagctggagaacccagtat[132 bp omitted]tgaaaccccatctctactaaaaatacaaaattagccgggcataatgacgcatgcctgtaatcccagctacttgggaggctgaggcgggagaatcacttgaacctgggaggcggaggttgcggtgagccgagatcgtgccattgcactccagcctgggcaacaagagcgaaactctatctcaaagaaaaaaaaaagaaagaaaaaaaaaataattcgggcagaatgatgagggaaggccgggcatggtggctcacacctgtaatctcagcacttcgagaggccaaggtgggagacttgcttgaggccaggatttcgagaccagcctgggtaacatgacaggaccttgtctctacaaaaaataaaaatattatccaggcatggtggcccgcacctgtagtcccacctacttgggaggctgaagtgggaggactgcttgagtccaggaggttgaaactgccgtgagtcatgattgcaccactgcacttcagcctgggtgacagagacagacccagtctcaaaaaaaaaagaatgattttggagagggaggaatgtgcagggtcaggaccacattcccagaagctcctggcacagacacctgtgggaagatccaccgtttgcctgtcacggcctctctggggtttgaccctcattgccttggagtgacttttgcaaaacaacttgatttctcacctcaaaaatcagtctttttctggactcctgaaagccacccagcttttgttcttgttgctcttcctgcctgtaattgtctctccttgaattcaatatagtagtcaggctgttcctttggacagtgtcagaaacacaactcagaatgtctccacaaggccaggcatgggggtcacagcactttgggaggctgagacaggaggaccacgtgaggccaggagtttgagaccaggctgggcaacatagtgagaccccgtctcttaaaaaaaaaaaaaaaaaaaagcctgcacaggaatggaatgcttggtaattaaagccttcagggcagggcaggcatcagcccaggactctgtttttctctatctctttgactttccttggcatgggttttaatggcagcagtgggccatctggtacagccggggccatcatgctggctgctgccgggagggcacagaaaagagatggacagaccctcacccctgcagtccgctgcccggggggctgcccccacagagctgggccgggttttgtgccaggtgagggggagctccaggccgtctctgagtgccagggtcacaggaggagctcacagccatgttgcttcggcccccgatgccagcccagtcctagtaaggacccagagctcccacccctggctgcacatgggtacagtcaggtgccatgcttcatggagctggcaggagctggggacacacgggagccctgccccttccaagatcaggagggtgagagctccgcaggagcaactgcagctgcccaggccgtggctgcaatccagacacccccgtgctattgggagctgggagtagacaggagccacacccagttgtgtctatggatgtggatgtgggcctcctgctctacagagcaggcaggagccccgccccccaaggcacagctgcagcccccaaaccggggctgtagacccaggcatccctgcactcctgagaggcctggaaaggcctcccttgtccttgtaggctcagaggtgcctgctaccactgcctggcctctccccactccctctcttgctctgatctcagagtggggttggggctgagcccaggtgctgacattgtccaccaggtgtgcacatgctcagggtagtgctaacatgtgcgagcactctgccaccttggcctcctccagacattgggtgccgaggagcacaagaggggaacctgagggggtgctaagggtggctgggtgctggcgtgaaggtgccccttggtgccagcagcctgggcaccatggatggccatgggaggcagacaggctcctgggcagaagggggcaggtccccagtgaagccccaccttcaggccaggcaggtttgaagcctgggggccagggtgccagtcctgtggactgaagggggaactcatggtgctttttcctgggcccacccatcctgccatggaccaataagcatgcacttcccctctgtgaggcccataaaagccccaggctcagccagagccagcagaggacagagagacaacaggatgaccagctacagagcggagctaccctctccagggctcctctctactgagagctgagcacttggtgggacaacctgcctacagagaagaactacccactgcgggtctcccctgagctgttgtaatactcaataaagctcctgtttgtctttttcacccttccgttgtctgcatacctcattcttcctggacacaggacaagaactagggcaaaggcaccaccagccacagaggtttctggccagaaaagcaacaccccaaagatcctgtaacagtttcaccagttaagtgtaggcctgggcactggagccagatggtgcctgtgacctcaggaaactaatagcgtgtgggtaggaagtgtccctaaatacactctcccccagcctctgtttgtctcttcatcagtaaaggggtact[226 bp omitted]ctgaggcaggagaatggcatgaacctgggagtcggagtttgctgtgagccaagatcacgccactgcactccagcctgggtgacacagtgagactccatctcaaaaaaaaaaaaaaaatgagaaggtgactgatatgtagtttggatctgagtccctgcccaaatcccatcttgaaatttaatttccagttttggaggcagggcctggtacaaggtgattggctcatgggggtggctttctcgtgaatggtttagcaccatcaccttggtatcaccctcacgacagtgagttctctcgagatctggtcatttgaaaatgtgtagtgttgggaatagacccccaaaatctggccataaactggccccaaaactggccataaacaaaatctctgcagcactgtgacatgtttgtgatggccatgacgcccatgccggaaggctgtgggtttactggaatgagggcaaggaatccctggccgacccagggtggaaaactgcttcaaggcgttcttaaaccacaaaaaatagcatgactgatctgtgccttcaggacatgttcctgctgcagataactagccagagcccatccctttatttcggcccatccctttgtttcccataaggaatactttcagttaatctataatctgtagaaacaatgcttatcactggcttactgtcaaaaaatctctgttcgaggctctcagctctgaaggctgtgagacccctgatttcccactccacacctctatatttctgtgtgtgtgtctttaattcctctagcgccactgggttagggtctccccaaccgagctggtcttggcagtgtagcaccttccccactctctcctgctccttctcccgccttgtgagatgcttgttcccccttcaccttctgccatgactggaagcttcctgaggcctccccagaagcagaagcctgtgttacacttgctgtacacagtctgcagaaccatgagccaattaaacctcatttttttttttttttttgagatgaagtctcactctgtggcccagggtggagtgcagtggcacgatctcacctcaccgcaacctctgcttcccaggttcaagtgattcttttgcttagcctcccaagtagctaggattacaggtgtgcaccactgcacacggctaatttttttttgtcttgaactcctgacgttaggtaacctgcctgccttggcaaatccaaagtactaggattacaggtgtgagccactgtgcccagcaaacctcttttgtttataaattacccagcctctgtcaggtgcagtggctcatgcctgtaatttgagcattttgggaagctgaggtgggcagatcacttgaggtcaagagttcaagaccaacctggccaacatggtgaaatcccgtctctactaaaaatacaaaaattaggccgggcacagtggctcacacctgtaatcccagcacttcgggaggccaaggcgggcagaccacctgagatcaggagttctagccagcttggccaacatggtgaaaccccatctctactaaaaatacaaaaatcacctgggcatggtggtgcatgcctgtaatcccagctactcgggaggctgagacagcagagatctcttgaacctgggaggcggaggttgcagtgagccaagattgcaccactccactccagcctgggtgaaagaaaaaagaaattaatgggtggcttagctgggtggttccagctcagggtctccctgaaaattgcagtcatgacatcagtcaggactatcttcacctgaaagcttgactggggctgaagaatccctttccaaaatgattaactcacctggccagaggacttggtttcctgccacccgtgtttcgccagagtatgactgcttgagtgtcctcactgtcacacgtgtccgtgcaaagagaccacctaacagactttgtgtgagcaacaaggctgtttatttcacctgggtgcaggtgggctgagtctgaaaagggagtcagcaaagggtggtgggattatcattagttcttataggtttgggataggtgtacaaattacattctcaagagtggggagaatattgcaaagtaccttcttaagtggggtggaggggagaatatatcatatcagttagagtggggcaggaacaaatcaccatggtggaatgtcatcagttaaggctattttcacttcttttgtggatcttcagttgcttccggccatctggatgtgtacgtgcaggtcacaggggatatgacggcttagcttgggctcagaggcctgacactcaccacatggcagctggctttccttaaaggaagtgatctgaaagggaacaaggtggaagctgtagtggcttttctgacctgtcctgtgaaatcacactctgtcatttccacaatatcctcttggtcacactgtttagccctattgagtgtgggcagagaccacacagcagcatgaatacctggaggtgtgactcctcaggtgccatcttggatgtg[143 bp omitted]ggcaaaagcctatctctaataaaaatatcaaaattagcagggcgttgtcacacgcctatagtcccagctactcaggaggctgaggcaggagaatcacttgaacccggaggcggaggttgcagtgaactgagatcacaccactgcactccagcctggcgacagagcaagactccgtctcaaaaaacaaaacaaagcaaaacaaaacaaaacacacaaaaaagagttttagtcaggcacagtgacgcatgcctgtagtcccagcactgtgggaaactgaggcaggtggctcacttgagcccaggggtttgagaccagcctgggcaacatggcaaaaccctctccctacaaaacatacaaaattagcagtgcatagtggcacacacgtgtagtcccagctactccagaagctgaggtgggaggatcccttgagcccaggaggtcgaggtggcagtgagccacagttgtgtcattgcactccagcctggacgacagagggagatcctgtctcaaaataaataaataaaaataaaaataaacagttttgacttcacaactagctaaaaagtgtattccctcactcagtgactgtactgttcagaggtgtatacctgcattaaaagccctttccttccttctctgtaactggagtagggaagggctatctcattggactggagtaacacacacagataaagccggatgcaaagttaacaggaaacactatttctctcaaggatacgctttgtttgttttttttttgagatgaagtctcgctctgtcacccgaggtggagtgcaatggcacgatctctgctcactgcagcctctgcctcctgggttcaagtgattctctggcctcagcctcccaagtagctgggattacaggagcacaccagtacgcccagctaatttttgtatttttagtagagacagggtttcaccatgttggccaggctggtctcaaactcctgacctcaggtgatctgcctgtcttggcctcccaaagtggtgggatttcaggtgtgagccaccacgctggccaaggacatggtttcttacagagactttgttctctaaattcataaattgttggaaattctatcagtaaaaatgaaacatccgagtcttgctgacaggatctaatccacttgatacagagtagcagccttgatttccaaagcaggtgcacagcttcagataaagggtttctggatgcaacatttcacatgtaccttcttgtttccagcgattcaggacactggtttcacttcacagtcctgatccaatgttgaccttgctttgctctaagctatcatttggttgtcacctaagctctaccctccccctttatcttggctttttcttttcttttttctttttgagacaggctcttcctctgtcacccagtctgattgcagtgatgcaattgatcacagctcacggcagccgggacctcccaagctcaaacaatcttcccacctcagcctcccaagtagctgggactacaggcacgcaccaccacatccagctaattttcttttttttctgcttccttttctttttgtttttttttagatagaggcttgctctgttgcccaggctggggtgcagtggcacgatcttggctcactgcaacctctgcctcttgggttcaagcgattctcctgcctcagcctcccaagcagctgggactgcaggcacgcgccaccactcccagctaatttttttgtatttttagtggagacggggtttcgccatgttggctaggctggtcacaaactcctgacctcagatgatacacccacttcggcctcccacacagctggtattacaggtgtgagctaccacgcccggccccccctcctttcttttgttttttagttgacacagggtctcaccatggtacagcccaggctggtcctgaactcctggcttcaggtgatcctcctgccttggcctcccaaagtgctgggactataggaatgagccatcacacctggcccctttcttcaattttcaaaacaaactgatccttcaaggtcaagaggaaatacctcctctgagaagtcttctctgaatgtcagaggcagacaatgtctgatttctgcatgctccccaacattcaatcatacagttattgaataacacattttgagagataactatgaatcaagtaacatgctggtttctgggagaattgaggacaaattaaccttgtggaaattttgggtggatgaaaaaaaccaacatgaaattaaaacactgcacacatttacagctgtgagaagcattacacatcctgggtgctatgcgagctttttttttttttttttttttttttgagttggagtttccctcttgttactgaggctggagtgcaaggtcacgatctcagctcactgcaacctctgcctccagattcaaacgattcccctgcctcagctcccgagtagctgggactacaggtgcctgccaccacacctggctaatttagaatttttagtagggatagggtttcaccgtgttggccaggctggtctcaaactcctgacctcaggtgatctacccatctcggcctcccaaagtgctgggattacagaagtgagccactgagcccaaccaggagctttttcgagaaagaaggaagtccaagagatcttcctgacaccctagtctgactctgccctttgcctgctcaaaatttccccatgcttcccagcggccttctggacatagatcaagtcccttctctgacaggcccaaaccctttatcatctgatcctagctcatttttctgagttttccttagttgctattattttctgtctaaagtgacatgtcataatattcataaagcacacaagtctt[142 bp omitted]gaaaccccatctttactaaaaatacaaaattagctgggcgtggtgtcgcatgcctgcaattccagctacttgggaggctgaggcaggagaattgcttgaacccggaggcagaggttgcagtaagccgagatcgtgccattgcactccatcctgggcaacaagagcaaaactccgtctcaaaataataataataataataataataataataataataatgtgtatacccatgtaaacaccattcagataaaaatatggcatatttggggcacccggggagtgtctcttgtggcccctcccctccataccctgctgatctatcagcacagattagtttctgccactttttaaacttcatattccttttctttttacacaaacacaaacattcgagtcatgactgggtggggtggctcaagcctgtaatctcagcactttgggaggccaaggtgcgaggatcgcttgagtctgggagttcagagaccagcctgggcaacatagagagacctcatctccacataaaaagttttaaaaattaaccaggggcggtgtagtcccagctactcaggaggctgaggtgggaggcttcagcccgggaattccagactgcagtgagccatgattgggccactgcactccagcctgggcaacacagtgagaccctgtctcaaaaaaaaaaaaaaaaaaaacaggaaaaaacaaacaaacagaaaagcaggcctggcgcggtagctcatgcctgtaatcccagcgctttggaaggctgagacggggttatctcttgggctcacaagttagagacaagcctgggcgtgggctatattgctagatccaggtctctgcaaaaaacaaaaccactcagtttttagtcatctataacgtcctgcctggaagcatgctattttgggcctctgagcttttgcacttgctaattccttctgcgctggggagagctcaaaccctgcccgaaacttctaaaaatggtgcctggataaatgaaggcattagagctgcgattggacggacggctgttggacggcgccactgctggcacttatcgggagatgctcattggacagtcacgtgacgggaccaaacctcccgagggagcgaggcaggtgcggtcacgtgacccggcggcgctgcggggcagcggccattttgcggggcggccacgtgaaggacgcacgttcagcggggctctcacgtgacccgggcgcgctgcggccgcccgcgcggacccggcgagaggcggcggcgggagcggcggtgatggacgggtccggggagcagcccagaggcgggggtgaggcgggaggcagacgggcgggaggagggcgagccccctcgccggcccgtccgggatccttcctaccggcctggggctgtgcgatctccaagcactgaggggcagaaactcccggatcgggcgctgccagcctccagtcccctccgtcctcggaggttcctggctctctgatccccgtgtcccgatccctgcctctctggcgctctcggaccctcgagaaccaggggatctcggaagccaagcccccgggcaggcccgggcttgtcgcccgcaccacttcctgcctctggcactggtgggaggggcgggtctcgcctctgccccctcaggccaggggtctggatgcatatagcgttcccctagcctctttccccggggagaatgtaggatacaggcccagcctcctggcctttctccatcagggactcagttgtctgggcccccccgtcactttatctgctagggtcccagaagtccagggtccccagctctgtcctccctcaggggccgtgagtctccacagtctcctgatcccctagaacccaagagtccaggtacctcttcccttcctttctcctctagggcccaccagctctgagcagatcatgaagacaggggcccttttgcttcaggggtgagtttgaggtctgattattgtggcacagatttgaggagtgacaccccgttctgattctgcaccctcactccatccccactctagtttcatccaggatcgagcagggcgaatggggggggaggcacccgagctggccctggacccggtgcctcaggatgcgtccaccaagaagctgagcgagtgtctcaagcgcatcggggacgaactggacagtaacatggagctgcagaggtgtgggcccctgaggacccagaagtccagccactgggctccttcaggacacaggactctcagccccgcattctcctcctcccctaagaactaggagtctgggccccacaactcagcgcaaacattccggactcccagccctcctctctgccaggatcttaaaaccctccttcagggagtcatttttcccaccttcctaaatgtctgtcttgtccccttcccttgtcccccgttggcctgttgcttttcatttcagcctggcttggggctcagtctccttatctttagtgtgcggtggatgcgggaattttccaccatcagcctgatgcctgctccccggcactggttctcctctctcctgcaggatgattgccgccgtggacacagactccccccgagaggtctttttccgagtggcagctgacatgttttctgacggcaacttcaactggggccgggttgtcgcccttttctactttgccagcaaactggtgctcaaggtgggcagctgcagggcagtgagcccagggatgctccccctcagatctgtgaggacctggggatcgtggtatcaaccccctgcagtggcccagtgaccacagagggcatggagagagatggctgtgcactgggtgtctgctccttcttttattcattcaacaagcatttactggacctgctatgtgccaggcctatacctggcacctgggacacagcactgtacaaagcaggctacatccctgctctcagggagttcacgtgcaggggtgaagtaaagtgggcagtgtgatttagcagagtggtcaggaaagatttctattttttttttttttttttttgagatggagttttgctcttgttgcccaggcttgagtgcaatggcatgatcttggttcactgcaacctctgcctcccaggttcaagcgattctcctgcctcagcttcctgagtagctgggattatgggtgtgcaccattatccctggctttttttttttttttttttttttttgtatttttagtagagacgggtttcaccatgttggtcaggctggtcttgaactcctgacctcaagtgatccacctgccttggcctcccaaagtgctgggattacaggcatgagccaccgcaacaagccaggaaagacttctaagggcaggtgacatcaaagagcaggtgacattaaagccaaagctagaatgataagaagcatgcagtgatctatagtgatcggggggaagaggcatctggtagagggaacagcaagtgcaaaggccctgaggtaggaccaagcctcatcttttgacagtagggaggaggccagtgctgttggaacagagtgaactggggagagggtgggaaaggaaggcacagttgggcaggg[138 bp omitted]cctctgcctcccgggttcaagtgactctcatgctttagcctcccaagtagctagaattacaggcacacaccaccatgcctggctagtttttgtatttttagtagagacggagtttcgccat[132 bp omitted]gagtgattggctggttttaaatacggaagcgacaagacctgatttataactttaagagattattctagcaagtatagatgccccttgacttgcaatggtgttacatcctagtaatcccatcataaattgaaaataacataagttgaaaatgcattcaatgccccgataaacccatagtaaggtcaaaattgtaagtcaaaccgtcataagttggggactgtctgtatagcaaaatgttaattgtagaatctaattataggtggcggctatatggcttttaactgtgaaattcttttaacttttcattatgaagattctcataagaaaatgtggtgggggtggtggtgaaatgctcctggctgttgttggccaaaagagatcatgaggcacaagggcagaagcgaggatcctggagaggtggcacctgtcatagtcttgctgaaagatgacaagccctggtggtagcagcagaggtgcggggggggcatttttttttttaagaggtagggtcttgctctgttggccaggctggagtgcagtagtgatcatagctcactgcagcctcaaaccgctggggtcaagcagttctctcgcctcagtctccagagtagctgagactacaggagcatgccaccacgccccactaactgttgcattagtctttttctatagagacggggtctcgctatgttgtccaggctggtctccaacagggagggatatttctttttggaagatttttttttttttttttttttttttttgatacagggtctcgctctgttaccaaggctggaatgcagtggcatgaccttggctcactgcagtctccacctcctgggttcaagcaattctacctcagcctcctgagaagctgggattacaggctctccccaccacaccagcaaatgggagggatatttctttctttctttcttttttttttttcctgagacggagtctctctcggttgcacccaggctggagtgcagtggcgcgatctcagctcactgcaacctccacctcctgggtttaagcgattctcttgcctcagtctcccgagtagcttgggattacaggcgtccgccaccacacccagctaatttttgcatttttagtagagatggggtttcaccatgtt[136 bp omitted]ggggcctgaacgtccgagatgaggggaatagcagtgcaggtgatggtggcaccacctacagagcggggatgatagaatagaagtggccagataaaggctgcaggagaagtcttgggagttgggagagcaggtcggggtccatg[222 bp omitted]gaggcagaagaatggcgtgaactgggaggcggagtttgcagtgagctgagattgcaccactgcactccagcctggagcgacagagtgagactccgtctcaaaaaaaaaaaaaaaaaaaaaagaaaagtcctctctggggaagtgacatttgccctgagagctgaagggtaagaatttgcttcgtcgaggcctgtttaggcggaaacaggagtacatgaagaagtcccgaggcaggaagaatttgatgggaatttaaaaaattaaaaaaaaaaaaaaaaatggggctgggcatggtggctcacacctgtaatcccggcactttgggaggctgaggcatgcggatcacctaaggccaggagtttgagaccagcctgaccaacatggtgaaaccttgtctgcactaaaaattcaaaaaaaaaaaaaaaaatagcccggtgtggtggcggatgcctgtaataccagctgcttaggaggctcaggcaggaggatcacttaaatctgggaggcggaggttgcaatgagccgagactgcactattgtactccagcctgggcaacaagatcaaaactctatctcaaaaaaaaaaaaaaaaattagccaggcatgttggcaggcacctgtaatcccaaccctttgggaggctggggcaggagaattgcttgaacccagaaggcaaagctttcagtgagccgagattgcgccactgcactccatcctgggtgtcagagcaagactccatcttaaaaaaaaaaaatggaagcagctcagcgaggcacaaaacaggaagtggaaaggtggagtgaggtcaggccaaagcctgcacacagggcttgtgggctgcactgtgccttcgggtcttcatcctgagggtactggggagccacagaaggctcaggggtggggcagttgagagtaacattatcttgtttacaattttattttttttatttatttattttttgagacggattcttgctctattgtccaggctggcgtgaaatggcgtgatctgggctcactgcaacctctgcctcctgggttcaagcgattcacctgcctcagcatcccaaggagctgggattacaggtgcctgccaccacacccagctaatttttgtatttatttattttgagatggagttttgctcttgttgcccaggctggagtgcaatggcgcaacctcggctcactgcaacctccgcctcccgggttcaagcaattctcctgcctcagactcccaagtagctgggattacaggcatgtgccaccacgcccggctaattttgtatttttagtagagatggcattactccgtattggtcaggctggtcttgaactcccgacctcaagtgatccgcctgccttggcctcccaaagtgctgggattacaggcatgagccgccgcacctggccatgtttacaatttttgaagccgacttcaattgtgggtggcagaaatctttgaggggaggcaaagaattgacaaaggaggtttggggccactatctccaggcagtggggacaaggttcagtccctaacgcccactccactccccacaggccctgtgcaccaaggtgccggaactgatcagaaccatcatgggctggacattggacttcctccgggagcggctgttgggctggatccaagaccagggtggttgggtgagactcctcaagcctcctcacccccaccaccgcgccctcaccaccgcccctgccccaccgtccctgccccccgccactcctctgggaccctgggccttctggagcaggtcacagtggtgccctctccccatcttcagatcatcagatgtggtctataatgcgttttccttacgtgtctgatcaatccccgattcatctaccctgctgacctcccagtgacccctgacctcactgtgaccttgacttgattagtgccttctgccctccctggagcctccactgcctctggaattgctcaagttcattgatgaccctctgaccctagctctttcctttttttttttttccccactgagaaggggtctcgctatgttgcccaggttggtctcgaactcctggcctcaagcgatcctcccgcctcagcctctcaaagtgctgggattacaggtgtgagccaccatgcctggcctgagtccagctctttaatgcccgttcatctcagtcccctgcccgcaatcctgccttctggcctcctccgtccctgatcccgcctctgcctgcccaggggctgcccctggccgagtcactgaagcgactgatgtccctgtctccaggacggcctcctctcctactttgggacgcccacgtggcagaccgtgaccatctttgtggcgggagtgctcaccgcctcactcaccatctggaagaagatgggctgaggcccccagctgccttggactgtgtttttcctccataaattatggcatttttctgggaggggtggggattgggggacgtgggcatttttcttacttttgtaattattggggggtgtggggaagagtggtcttgagggggtaataaacctccttcgggacacacttcggcatctgagtcactgggcctctgccccgctccccggcacgtcaggagagcaggccctgtccgctgccccacgccgggcccgccgtctgctggcctagagatacctgcttgggccactcagggacgtggggctctctgcactcacttgacatctttttctggggtgccctgtggggtctgtgggttagggatgagttggtcctgggcctgacctgcaggagctcacgggaaaggaaaagaagggagctcacgggaaaggaaaagggagctcacgggaaacgagggtgataggtggtacatctgtcgcagcccaggatgatctgtgcgggacagaggcagcggcctgtgaggcccaagcaggcgtgtgggtaagggaagaacagcacggccggctgcagagcaagcctcctcggcccggggaccacagcctggcgtgtcacacgtgggacctcaggaggccatacctttaccgagctggagaatgggagtggggggaggagggatgggaggaccagaggagcaggaagggctctggagcctggtggtgaggtcgctggagggtggcaggctgaggacaccagggcgagggcccacgggagaggcctcctgagctgggctgaggacagagaggaagggacctggctggcgactgagaggctggagggcagggcagaggaggaggaacctggtctggccccacagctgggtggggcccccctggagaggaactgccggaagaaggtgctgagctcagaggcccagtgaccttagacacaggcggagcgaagacaagggggctagaggatgtgggttctcagtcacagggtctctggcacccccctctgggtctttaccccctcccatctctgggtctctgtccccatgctctgggtctttgctttccgagcctctgttcccaccccacctttggccctctttctctgggcctctttccacccctggcacccagacctctggccccctctctctgggtctctgtccccccctctggatctctggccccccatctctctctgggtctgtcccccgaccctgagtttctgtctccctctctctgggtctctgtcctctctctggctgtcactctctcttgggtctctgtacctcccctctctctgggtctctttccctctccccggtctctgtcccccgcccccgggtccctgtccccgcccccccaggtctcagtcctccctagtctctgtccccttctctctgagtccctgtcccccctctctctgggtctctgtacccccttctctggatctctgtccccacctctctctggatctctgtcccccactctggatttctgtcccctcccgccgggtccctctgggtctctatcccccccacccctgggtctctgtacctccctgcctctgtccccccccacctctgtccccccctctctctgggtctcttttcccctccctctgggtctctgccctcctctctctaggtctgtccccctcccctctctctcagggtctctgtacccctctgtctccgggtctgttttcccctctctctgggtctctgtccccctctctctcagggtctctgtctgagtctctttttctctgggcctctgtctccccaccccacgttctctatggtcttcagatcctgtctctctcagcccctcctctccctccacctatgggccccaaggcccctctcggccgactaaaggtctctgggctgaggtatgacatttggtaaatgagtaactcgggccccacagtcaacggggtgctttggacggctgcccctcctccatggactcttcccagagaccccaagtcaggggagagagaggggcagaggatcaatgagtgtacactgagccaccacccagagtgaggggacaatatggccacaggcaggatcccagaaaaaaaaaaattatgggaaccaaaaagacacggagacaaagcacacagccggcttccaacaaggggggaccttggggtagggggcccgatttgggtctgagccaggtctagttctgagggtcccaccaaaaaagtcggggagtgccaaggggatgaggtcagcgagtggccccacccccatccgtccccgcgggggccccttcccgcgctgagctcagcatgactcagcagtcgctgcctgcaacaaggaccccagataccggcctggcggggcatctgcagatcccctcggtcaggggctgccccgcctgggctgttcggagcagctcctctgtagggcagggcctgacctcaccccacaccccagtggcttcagctccctgcccagcgcacgggctgcctccatcagggcacttaagtagagtcaaggtttgcgccgactccgtctcccagaaatcaacgtggaccaggcccacttaaaaaatatgcattagtcgaagacagacgtctcgtccataggtccccagactgtttgtccacaacgcagggcttctctttgtgggcctgaaggagcacacgtcaggcaagacacgagggcaacttcagagacactgttcagggccacggagaattctcgaagtctgtgagttgtctccaaaacagcctccaggaaatgcaatcccagagacaccgcaaagctcaaaacagacttttcattcctccccatttccactcccagaaaaagcctgggcccctgaaagagctccaaggtatccccaaagtcccagcccatctttggagggttccagagggctgtccagggttccagaagtcaccctacctcatacaatgctcctcctgggcttcccgcactgggtgaaacccacggctccagaataactgccctttccaacttgcagagcacctcaagaacctaaagatttccccggggagggctccaaaatatagagagtttgcatcgtgaacccccacccctgtaaatcccaggactccagtccccgcaacactccatcttccagagatctccaggggtccagaaataacacctcacagccttccaagcttcccaaggatccggagactccttatctcgcagcgcaaacctcaggcaactacaggtcctccctgcacctttgaggtgcccctccccccactcaaggttccagaaaaatccatgccctcggaaaccccagaatcttactttcccgaggcaccccaggaccccagggtcatcagttcacagggctgttagtgctcccataaaactctagcctcccagagggaccccagcccccaccctcccgcccacgaacccctgcatttccagaatcagccccagggccccaacccccccaagcccccatttcacaacacgctggcgctacaggcgcgtgacttccccttgctttggggcggggggctgagactcctatgtgctccggattggtcaggcacggccttcggccccgcctcctgccaccgcagattggccgctagccctccccgagcgccctgcctccgagggccggcgcaccataaaagaagccgccctagccacgtcccctcgcagttcggcggtcccgcgggtctgtctcttgcttcaacagtgtttggacggaacagatccggggactctcttccagcctccgaccgccctccgatttcctctccgcttgcaacctccgggaccatcttctcggccatctcctgcttctgggacctgccagcaccgtttttgtggttagctccttcttgccaaccaaccatgagctcccagattcgtcagaattattccaccgacgtggaggcagccgtcaacagcctggtcaatttgtacctgcaggcctcctacacctacctctctctggtgagtccccaggacgcccctggccctaatttcctccagctgcgcacctccggccctcactgcacgcgccagccttctttgtgcggtcgggtaaacagagggcggagtccccttggcctcgcctcccgctaaccattgttgcctccatctcttcccgtagggcttctatttcgaccgcgatgatgtggctctggaaggcgtgagccacttcttccgcgaattggccgaggagaagcgcgagggctacgagcgtctcctgaagatgcaaaaccagcgtggcggccgcgctctcttccaggacatcaaggtaactagtgtgtgggtaatggactacatctcccagcaggccgtgcgcgcgaggagccttgatttgagggcgtaggtgtcgcgtgggcttctgggagattgagttcggtcttgtgagccctcttaaccgctggaaatagaggcgcacctcgtgcagtgcccacaacacgcggcagtccacaccgctgcgtggtcttagggacgtatagctgtaagagctaggacagggtgcggagagtgataaatacaagctgtcacatgtctttgtggcctgggcctctgacccccaacgactcttgggaaatgtaggtttagttctatgtgccgagtgtgtgtattctgagccatttctcccttctatatagaagccagctgaagatgagtggggtaaaaccccagacgccatgaaagctgccatggccctggagaaaaagctgaaccaggcccttttggatcttcatgccctgggttctgcccgcacggacccccatgtacgtacccgctgcatccatggctacccaaccatacccctcaagcctctgctccctttgggcaaatttccttcagagcctcatttcacacctgtcacattttaatctgcaactggctgctctctccccctcttttccagggattgggtttctaatttctccctcttctctctcagctctgtgacttcctggagactcacttcctagatgaggaagtgaagcttatcaagaagatgggtgaccacctgaccaacctccacaggctgggtggcccggaggctgggctgggcgagtatctcttcgaaaggctcactctcaagcacgactaagagccttctgagcccagcgacttctgaagggccccttgcaaagtaatagggcttctgcctaagcctctccctccagccaataggcagctttcttaactatcctaacaagccttggaccaaatggaaataaagctttttgatgcagctggtggttttgtgtgtggtgtggaagatgaggtgggatctgttctcataaagcttctggctgggttgggatgccagtgaaagaggagttggccccatctcccattttcttaactgtcctaagacaagaggctatctgggtagtgttgaacctgagggttctctgcttgcctggctgttaactgtccctcccagatggtagagatagactccagggagttgaattaagacctaggttggtatctagaaacagatgttaggtctcagccagaaacagccctatttaacgagtgattatggggccaggtgggtcgctcacctgatgtcaggagttcgagaccagcctgaccaacatgaagaaaccccgtctctactaaaatacaaaattagctgggtgtggtggctcatacctgtaatcccagctagtcaggaggttgaggtaggagaatcgcttgaatctgggaggcggaggttgcagtgagctgagatggcgtcattgcactccagcctgggcaaaaagagtggaactcccatctcaaacaaaaaacatgtctgcctcacggaagttgcggtgagctgagatggcgccactgtgctccagcttgggcaacagagtaagactctgtctcaaaaaagaaaaaagcctcaattctgggaggcagttggaattattaggccctttatatgggcacattgacgctattgctatgcaacttgcatggcaaccggggggctcactgaggtctttgctccagagtttaagagattatggcccgagcttgagtgatcccaatgtgaggcgcacactgagaggaactggccagtggagctgagcagccaggaacacgtgatgcccaagcaatgctggacaaggggtttagggttcatcacagaaatgggatgtgaaaccttgggccggattctccaaatgggaactgaagaagcttaaaacaggccttaaaaagcacttgctgtgtccaagctgcaaaactgctgtgtcagctctgactcttccccttctccttcccctgggtctggggcagggtggttcaagcctgtaatcccagcactttgggaggccaaggcaggacgatcacttgagcccaggaggttgagaccagcctaagcaacatagggagaccccccaagtctctctagaataagaggatgagctcagaccagggaaggggtggtactggggggacgtcacagccaggcccaccaagtgtcatgtctgaccacacctgggattcttaaatatagatgtatttttttcatctcatctccggacacactccaatcacacccctcctgccctcccctctcaactgcaaaccaagcggtgcagacacagcacagcacacatgaggggccctccctttcaccaaagctgaaggcagggcacagtttggggatggaagagcctcgaggtaaatgtgggggttctagaacccagtgacctcagttctggatcatgggaaagggatcagtatgcagtaacgtggtaaggttccagatctagaagccaggacctagaacctagtggtttcacagtgggcagagcagttgggaataagccaggttaggggtgggggaagacagccagctctgtcctctgcaggcggattccctggagggagatctcagatttagaaaggaagagtaggatctggtccagaaagggccagaaagacaggaaggcatctggactgagactgtgtgtcctccagaaggaatgagcagccaagtggttctaccacctcttgcttggccaaagtgtaggggatgacaggagccggatggagggatcctccaggcagagcctggctctgacatgccagggagggctagaacatccctcccagagccccacttctggagttgaaatggaggaccatctgctctcagttaccttcaaactctgaaagtgccccggctctggacttgatcgccccattcgcagggacaccacgtggtttccagaacttggtggcccgcatgccgggcctgagcgtggcctgctctgtatgctgtagaatttgtaagccacacggggggctctaaaagccccagacctgaaagcaccatgccaggtttcctaaaacctctggcaccaccgcagagtaatggcagattcctggcctctgggaagcggtccaggcccaggggactccagggcgctgattatgcatattctggagccagagaaaggcacggctttgtggattctggagtgcaggaacttggaaactggagctggagggggtggagtgtttggcggactgggtgggggcactgcggggccacacccagtgcagatctggagcgggggtttaggagcagcacccctctgcatcctctctctggagcagagaggcaggacaggcggggagtgtggtggggcggacttagttacgctcctcgcccagggagctggtggggctgaggggctcgctcggggtgctgagtgagctggaggtggccgtgtccacagagttgcgcttgctgccgctggtggaggaggtgcaggacgctcggcgcggccactctggtgcacggatgttgcgccggtccttggcggcctcctcgtcctcatcgtagcgctcgccgtcttcctccagcggcccgttccggggatcctcctcgtcctcactctggtgcgggctggagtgtcgtgacagcgagggcgacggtggcaccgaggctggccgtgggtagcggtacccctgggcctgcatacggcgatgtgggtgcaaaccagggtgagctgaggacctcacagtcccacccaggcatccagccacctctaggccttcccactccaggagggacccccaccccaccgaagcccagccctttagctcctggctaagcagaaatccagggtccactcaccgcatccgcctcgttgggctcgtaggtgaagtgctctggaaaggccttggacagcgccatgtggcgcgcagacatatagtactaggggaaaggaggagagggggcagaggatgtgagagccaggccccacccccaggcagatgatgggggtcttggccacaccctttatgcagatgagcacactgctgcaccccatacaaataatccatctatctgactccaccccttatgtagataagcagacctgtgaatggacagtttctgagccatacccctcaaacaggggccgaattctcaagtgagtctcctctttggccacacccttatgcaaatgagaacgcctgaccaatgttctttttttctttttaaacacggtcttgttctgttactctaggatggagtgcagtgggtttgaacaaggctcactgcagcctcaacctccggggctcaagcgaccctaccacctcagcctccccagtagctgggactacaggcacgcaccatcacgctcggctgatttttttttatttttagtaaaaataaaatgttgcccaggctggtctcttaactcctgagctcatgcgatccttcctgttaggcctcccaaagtgctgggattacaaccatgagccaccatcgcgatcggcctggttcattgcttaaagggacagcaactgttacaagtaggatgagaccctgcaccctgcaccaaagacccctagccaggagctgctgatttgccaggagaggataggaaagtgggggtcctacccggcctaggtatttccagtccagaaggtcggagaggcgctccgtgcggttccgctggatgatacgctgccgccggctctgctgacagaaactgtagaggaaggaggtgagctgcgagcaggaatcatccaggctgcggaaccgccggtcaagaatgtagatacctgtggaggccaggacccaggttcagaaaacatcctggggagatcttcatggtctccaggactctgtggcaccaggacccctcctctcccagcggcccgagagcccccccatttcctggtgcccctggtctccaagggtgcaagctcctccttcccaggatccaggagtcactgttctcaagcccccttccagaatcctcaggggcctgggcgctgaccgtaagctgaggggtctgcgatgtgttcctccatgaagcagccgaagccggagagattggtggagatactggggattcccataaccgtgcactcagctgcgggaaggcaggagagagacccacttagcttccctcatcgcctaccgtcttaatcgcaatagacgcctcaacaccgccctctactggcgcctgtaccaagtgccaggcgctgtgcggagcgtcgctgagcccccacaaccaggctgtgcatttccctatttctcagaggggacgctaagaggctcagaaaagagaattacttgctcttgctccaagatgcgggaaagtccatagttgggagataaggatgctaatttattgagcatcccaatatccatttgacttaactctcacaacctgtaggatcgggccaaggtccatcattctacttaattgtcacaacctgtaagatcctttcttgtgccagtatcttgtacggacttagtctattttgatggggggtaagataaggtctctcattattagtatccctgtgtacagagcatctagtacgtcttgtttaatacctttaacaaccttgagaaatagttcaaggaatgtattataattttttgatggatttttatgcttttttttttttctttcgagacagggtctcactctgtcacccaagctgtagtgcagtggcacaatctcggctcactgcaaccttcacctcccgggttcaagcgattttcgtgccttagccacccgagtagctgggactacaggcacacaccaccatgcccagttaattattgtattttttagtatagacagggtttcaccatgttggccaggcaggtcttgaactcctgacctcaggtgatccatccgtcttggcttcccaaagtggtcaaattataggtgtgagccactgcgcctggcccaatgctttttttttttttttctcgagacaaggtctcactttatcacccaacctggaggacagtggcttgatcatagctcactgcagccttgacctcctaggctcaagcaatcctcccacctcagccacccaagaggctgggactacgagcacacaacactacgcatggctaattaaaaataaaaaaaaaaaaggccgggcacggtggctcatgtctgtaatcccagcactttgggaggccaaggcgggtggatcacgaggtcaagaagagaaaaaaaaaaaaaccatcctggccaacatggtgaaaccctgtgtctaataaaaatacaaaaattagctgggtgtggtggcaggcgcctatagtcccagctactctggaggctgaggcaggagaatcacttgaacccgggaggcggttgcagtgagccaagactgtgccactgcactccagcctggcaatagagcaagactctgtctcaaaaaaaaaaaaaaatcttttatagagacagggtctcaccatgttgtccaggctggtcttgaactcctgagctcaagctatcctcccacctcagccttccaagatgctaggattataggtgtgagcc[136 bp omitted]acttcccgaagggctgggattacaggtgcctgccaccacccccagctaatttttgtatttgtagtagagatagggtttcaccatgttggccaggctggtctcaaactcatgtcctcaagtgatcctcccacctcggcctcccaaagtgtggggattataggcgtgagccaccatgcctggcctgatctataattcttatgtaagttttcctaaaaacatctgtaaactgcaaaaataggcactaaatataatacatctgtcaggcatggtgggatgcacctataatgacagatactcaagaggctgaggcagaagcacctgaacctaggagttccaggtgagccttggcaacagagtaataaccccatctcaaaaaagaaacaaatagtaaaatgtattaaatatatatttatgatatagtttgactctgtgttcccccccaaatttcatctcaaaatgtagtccccacgtgtcgagggagggaaatgattggattacgggggtggttcccccgccgctgttctcatgatagtgagtgaattctcacgagatctcatggttttataaatgttcgtttttcctgcaccctcacatacttctccctcctgccgccatgagaagaagcttctttcttccccttctgccatgactgagttttctgaggcctctccagacatgtggaacggtgagtcaattacacctctttccgttataaattacccagtcttggattttttttttatagcggtgtgaaaacagactagtactatctatcaatctatctataaaacaaggcctatggaaaaagggaattggggctgaccgcgactcctaattatcatgcaagcacagtttgcaggacttgttaaattactaataaattaggaaatggcactaatttagctttaatttttttttttttttttttttgagacggagtctcgctctgtcacccagagcacagcactgccggagtgcagtggcatgatctcagctcactgcaacctccgcctcccaagttcaagcaattctctgcctcagcctcccaagtagctgagactacaggtgcgtaccaccacacctggctaatttttgtatttttagtagagacagggtttcactatattggccaggctggtctcaaactcctgacctcatgatctgcccatcttggcctccccaagtgctgggattacaggcatgagccaccacgcccagccttatttagctttaaaaacactggctaatgtgaaccaacaagaggaaggtggagttgatgggcactgggaacgtcttacgaggagacttggccacactcggctgtatttgtgaattgtgcatttcattgccactatttggggggccactgctttctgggagaaagcagtgtgaactgtgacatccagttcactagtcctcaaaacccagtcttctagtttctcaatacatgagctattgtatcacaaaagcacgcgctgtagcagaacaggtgattaccattgttcctgttttgcaaagaaggcaacaggctcagagaaggccagtgcctcgccccaagacatgctagctctgactaggatgccatgaccacgctgtcccctgcccactacactcacccggtgtgtagccccaaggctcatagtaggaggggaagactccaaggtgacagccacggacaaactcctcatagtccacagggagcagggggcttgtggaggagaggaactccgggtggaaaatcacctggtagtgaaaaagaaggactcagcccaagtgccttatttagctaagccctgagatcccaaggtggcccagagagggtaaaaagcttgtctagcatcacacagcatgtgtttggcaggaccaatgttcaaacccaggtctgcctgcctcagaagccagggttctttctaaccacagcaatacctttgataaaacttataggggaatggagtgtgtgaggcccaggacccaaccccttccctctgccgtgcccaacccagccctgaccaaatgccctcaccttcaccctgtcggcactgctattgaagaggccgattcggcggatggtggtcaggatggggtctgaggagtcatccagcatattgtgggtgcacacaggggggaaagactgccgctgcaggagccacaagaagggtaaggggtcatggaagggacagagaactccctacttcctcatgagccatgcggaccctgggggagccaaggagaccacaaatgcaccggacgtggggcaacaaacccaagtgatcaccaggagttgtggattcccactagtacaacctgtaaaggttttctttcttttcttttaaattattattatttatttttgaggcggagtctcgctctgtcgcccaggctggaatgcagtggcacaatctcggctcactgcaagctccacctcccaggatcatgccattctcctgcctcagcctcccgagtagctggaactacaggcgcctaccaccacgcccggttaattttttgtatttttagtagagacgaggtttcactg[136 bp omitted]tcactatgttggccaagttggtctcgaactcatgggctcaagcgatgcatccgttttggcctcccgaagtgctgggattacagacatgagccaccacacctggcctggaaatgttttccttcccttaaccaccatgagcttcaaagaactagaattcccagctgtctttgaggcaaagccgtgttagcaactcccttacctccaaggactatgaggagttgcagctaccttgttctgtactctgggctctattattaaagaaacccaaaggaaatataactatccccagtcaatgggggtggagactgtgccaatatggcagcaagctttggagactgctgggagttgtagtttccttatgaaaattcacttccaaccaccaggcgtgg[298 bp omitted]ctccaaccctaacaaaggcccaaagaaaccacaatttccaagagtctctggagcaagacagagctagtgtgataggaagtcctgaggactgctggggtgtatagttcttagcaactgttccatcatagctcattaaagattttacttaccaccactctactgagtctaggggcccgagaaactacaactcccagcatcccgatggcagaaacattcataatgaggtgggctgctttagggactattggaaattataggttagccaaaagcagttcacgttttgtttctacaacttagctgtctgggtttccattccccaggaaatggctccccaatgtagaccacaagtactgaagtccctggaccccagagaatgaaagaactctaactcccagaagcctctggacaagggaagcgtcaatgccccagaaagccagcaggggctgctgggagttgtagttttttgggcccctagactcaatagaatgacggtaagttctcattttataaatgccaattctctctgaagttagggatctaaagcagctacaattcccaggggtgtctggggaccaacacacagcctctggaaataagaaaccgcagctgctgagagtttgcaatgttttctggagaatgctgggtgcttttgctcacctcctgactgcgtccctaaagtggcccgataaaactaccactcccagcagttttaggggtagaggtggagccgtgtgcagcaaggcccaaggagagctgagagttgtaattcttttatggctgtcttgaccttttcttttctttcttttccttctttcgtgtgtgtgtgtatgtgtccgcctcgctctgttgcccagtctggagtgcagtggcataatcatagctcactgcagcggcataatcatagctcactgcagccttgacctcctgagctcaaggcatcctctggcctcagcctcccaggtagctgggataacaggtgtatgccactatgcccagctcatttttgtatttttggtagagacagggtttcatcatgttgcccaggctggtctcaaactcctgggctcaagcgatcctcccacctcagcctcccaaagtgctgggaatactgacaggtgtgagctaccaagctgggccttgactttcttttgggggtgggtggggggctagtgtgggatctggctctgtcccccaggctggtgtacagtggcacagtcatggctcactgcagcctcagcctcctggtctcaagtgatcttcctgctttggcctctcaaagtgctgagattacaggcatgagccaccacacctggccctttattacatttctacacttccttttaaacttccctttgggctgggaacagggactcacgcttgtaaactcagcactttgggaggctgaggcagacagaacacttgaggtcaggagcttgagactggcctggccaacatggtgaaatctcgtttctactaaaaatatataaattagctgggtgtggtggcatgtgcctgtaatcccaggtacttgggaggccaaggca[137 bp omitted]ttccttttgctcattgaccccagaatcccagagaaaccacacgtcccagcaaccctcgtggcagaataagccacagaaaacagcccaccctaagtgcctcgcctccagcaactgaagttgcacgagtcagcacgtgcccttctgtggacctcagaatagatcccttcataaagggctgcaggagaaagcaggactcccagcaatctctggggtctgagctggcctggcaagctgcctctggggctgccaggaactgctatctctctgcacagaggtccaatccatacctgcgttgcaaagatggctctcttcatcatagtgaagtcttccttatccagcatcttgttcatgtcgggaaggctcccactgcaaggcaagcaggggcatgcatgtgagaacggagtaatgagaggggttagtcagggcctaggagggcacagggctgagggtggggcactcacaccagtaaggattcataaagcttcctcccgaacttttccttcaccgtgttggccgtgtccctggaggaagcagagcaacagggtcacatacacaccagctgccatttactgttaggcttctttagttagtttgtttgtttattttgagacggagtttggctcttgttgcccaggctggaatgcaatggcgtgatctcggctcactgcaacctctgcctcccaggttcaagcaattctcctgcctcagcctcccgagtagctgggattacaggcatgagccaccgcgcccggctaattttctatttttagtagagacggggtttctccatgttggtcaggctggtctcaaactcccaacctcaggtaatctgcccacctcggcctcccaaagtactgggattagaggcttgagccactgtgcccagcagtttatttattattattattattattattgacagagttactctgtcgtccaggctggagcgcagtggtgcgatcttggctcactgcaacctctgcctctcaggttcaagcaattctcctgcctcagcctcctgagtagccgggattacaggcacctgccaccatgcccggctaatttttgtaactttagtagagacggggtttcaccacgttggccaggctggtctcgaactcctgacctctggctggtaattggccacctcggcctcccaaagtgctggaattacaggcatgagctgccgcgcccagctacccttaggtttctaggatagcaaggaaactgaggtgtgagcagggaagccgtgccctggggcctccaggctggaggatggggacccagggggcaggccctggaaggcttaggacccacgtgcctgacatcagctgtgtggtcagggacaggtggccttccctctctgactgcagtgactcatttttcagaggaggatgaaaatagaatcaacctcagaggtttgcgatgaggacccaatgatgtcatgccaaaaagtacacatggcaagccttccagaaatgtcagctattattaggacttgtacttgtcctgcagatggcaatgctaagccccattttatacgaaaagaaagtaagattctgagaaaggaccacttaggcacacaagtaaagctagcagtgtcacacaacagccccacggtcactcctccacttaaaatcctcccatagctctggcctcatttatt[137 bp omitted]aattctcctgcctcagcctcctgagtagctgcaattacaagcgtgcgccaccacatctggctaatttttatatttttagtaccgatgggatttcaccacgttgaccaggctgatctcgaactcctgacctcaagtgatctgccctcctcagcctcccaaagtgctgggattacaggtgtgagccaccgcgcccagcctctttctttcttttttttttttttttttttgagaccgagtctcactgtcacccatgctggagtgcattggcgcgatcttggctcactgcaatctctgcctcccgggttcgagcgattctcctgcttagcctctcgagtagctaggactacagatgtgtgtcaccacgccctgctgattttttttatttttaggaaa[131 bp omitted]agacagagtctcactctgttgcctaggctggagtgcagtggcgcaatcatgcctcactacagcctcaacctccagggccaaaatgatcctcctgcctcctgtagctggcactacaggtgccctccatcttgcctcactttctaccccttctctatgagacatgtcactccagccccatgggactccccaccgcgtctcaatcatgcctcggggccttcgagtttgctgttcctcagatacccacagggcttgctccctcgtcacctttcctcgtctctgcccaataacactttctcagtgtggcctgtcctgacaaccccgtctcatattccagttctgctttatttttgcccaaaagtaaattccgtctacaggattttctagaatacaagctccatgaggaaagggatcttatctttctggttcacagctgtattcccaggacctggaatacatgaggagggcaggtcacttgaggtcaggagttcaagaccagcctggtcaacgtggtgaaatcccatcggtgctaaaaatataaaaattagctagcacatagtagatgctcagtgagtatctctgctaatgaatgaacggttttacagatgaagaaactgagctttgctgggaggcggaggttacagtgagctgagattacgccactgcactccagcctgggcaacagtgagactctgtttcaaaaaaaaaaaaaaatcagagaaaagaaaaagaaactaagccaggcgcagtggctcacccctgtaatcccagcactttgggatgccaaggcggctggatcacctgaggtcaggtgttcaagatcagcctggccaacatggtgaaaccccatctctactaaaaatacaaaaaaaggctaggtgtggtggctcacgcctggaatcccagcactttgggaggctgaggcaggcggaacacctgaggtcaggagttcaagaccagcctggccaatatagtgaaaacctgtctctaataaaaataaaaagttagccaggtgtggtggcacacccctgtagtcccagctactcagaggctgaggcaggaaaatcgcttgaacccaggaggcagaggttgcagtgagccgagatcatgccattgcactccagcttgggcgacagagcaaaactccatctcaaaataaaaaaaaaaaagagggccgggtgcggtggctcatgcctgtaattccagcactttgggaggctgaggcgggcagatcacgagatcaggagtttgagactagtctggccaatgtggtgaaaccccatctctactgaaaatacaaaaattagccaggcatggtggtgtgcacctgtagtcccagctactcgagaggctgaggcagatgacttgcttgaacccaggaggtggaggttgcagtgagccaagatcgcaccactacactccagcctgggcgacagagtgagactgtctcaaaaacaaacaaacaaacaaacaaacaaaacaaaaaactgagactctaggagaaacacaggacccaaagcatgcatctgggagtgggctgcgccaggggccggagcgagggctgctaaccaaagctgtttgcgcacagcttggcctttgagggtttccacgttgaaattgttggtccgcgctggcatgatgaagaaggcaaccactgtctgctcgctgccgttcacctgcgcagaaagaaaggagggggaggccaggatcatgtgggggaagcctggaaccagccagcctttctgtcaagaccactgggatcctgccatacccattcctgtcaaggagaattataggacagtccccacctggactctgaccttctttctgggtctctatactcccctcacggccccccaccatactcaggggctttcctacccccatcttcctggcttcttgggtttctgttctgtaattttttgttttgttttgttttgttttgtttttgagacagcgtctttttctgtcgcccaggctggagtgcagtgatatgatcttggctcactgcaacctccacctcccgggctcgcgtgatcctccccgttcaccctcccgagtagctgggactacacgtgtgagccaccatgcctggctaatttttgtattttttgtagagatggggtttcaccatgttgcccaggctggtctccatctcctgggctcaagtgatcctcccgccttggcctccaaaagtgttgggattacaggtgtgagccactgtgcctggctgttctccctagttataaactgctttgcttgccctccctgtcccctcatagcccaggcctcactctgagcagatagttgagccgagccaatgcctccaggaagacgtcagcacccttgttggagaactcatagcggccggcgataaagaagtataaggtcttgtccaagttgaagtccagatgcctaaagaacccacaaggcacggtaaagcccaaagccctcacccgctagccctggcctcaaaactacaaatcccagaagctatgggtgggggggcagaggatgtcttaggtaatacagaggcatcacggggcctcctgggagttgtagttcttctctttagatggagatttcctttaatcctgagcccattgttccagcgctcaagaattaaggaggccgaatacccaggtgccccctccctcagacccaggagtctgggcccccagctgccccctcccccagacctagatggttaggctcccaacgccctcctctcttaagacctaggtatatgccccacgtacccataaaaatggccccgcacaaactcctggattcgagccttgctctgagcatggaggttctggaactcatgcatggcagaaaacttcttcacattcagcccattgggggtcacaatatctgggattgggggtgagggtcccatgttttatttgttcattcagatcaatgttgtggttgaatgaataaatgaagaaaacaccctttgccttttgcaatttttttgtttcaagagcgttcctatgaggtcccccctcccaccttttttgtttgtttgtttgtttttggagacagggtttctctctgtcgctcaggctggagagcagtggcacaatcacagctcattgcatccctgacctcctgggctcaagcaatcctccctcctcagcctcccgagtagctggcactacaggcgtgcactaccacacccggctaatttatttattttacttttgtagtgatggggtcttgtcatgttacccaagctgatctcaaactcctggcttcaagcagtcttcctgccctggcctcctaaagtgctgggattacaggtgtgagccaccatgcctggccagttcccttggtgacacacctaccctgactccaagatgccttcttgcctaatattacttgcttaggttcacaagcacaagtataagtctcctcagctactgcaaatggctaacagggatctgatccacactggtgattctgggaaagttgtacttcttttgtttcctcttagcccaccctgagatggaaatgattaaacatccccaaagtcctgcttctcctaggatatatcctctacttccaagcttcttacagggacccaatcatttcttctcctcatagaaattaaagtatatcaacgaaaaactacaacccccatcagcgcctagggcaaagttctggaacatatagagctaaccagtcaaaggccttctgggagttgtagttctcaccttatactcactgagaacggatactaagggctgggaagaatgcccagttctgacctaacctttctcaaaagcaaagtccactgatcttccattccctttcataagaccaatctacattagccaattacagaattttatcatatctgaaattaatatgaaagaaattatacctcccattagcctccagagtatatagtcagagagcctcaaatacaggtcaccacccccacagccttctgggagctgtagttctctattctttaggtaaaaaaatggtaactgatggtccccagcttaggacttaggatggtccaagttatgatttttcttttcgagacagagtttcgctcttgttgcccaggctggagtgcaatggcacaatcttggctcacgacaacctctgcctcctgggttcaagagattctcctgcctcagcctcccgagtagctgggtggctgggattacaggcgcctgccaccatgcccacctaatttttgtatttttggcagagagggggtctcacaatgttggccaggctggtcttgagcacatgacctcaggtgatctgcccacctcagccttccaaagtgctgggattacaggtgtaagccaccgtgcccagccaagttatgatttttcaaccttatgatggtgtgaaagttacatacatccacatgagtccaattttggattttgatgagatattcaacactttttttttttaattttttgagatggagtctcgctctgttgtccaggctggagtgcagtggtgtgatctcggcccactgcaacctccgcctcctgggttcaagtgattctcctgcctcagcctcccgagtagctgggattacaggcacccaccaccacgcccggctaatttttgtatttttagtagagatggagtttcgccatgttggccaggctggtctcgatctcctgacctcgtgatctgcccgccttggcctcccaaagtgttgggattacaggtgtgagccactgcgcccagcctattcaacactttattataaaataggtttgtattaaaattagccaggcgtggtggcaggcgcgtatagtcccagctacttgggaggctgagg[139 bp omitted]tggatgattttgcccagtcgtaggctaacataaagtgttctgggcacatttaaggtatactagcctaagctatgatgttcagtaggttaggtgtattaaatgcatttttttattttttgagacagggtctcactgtgtcacccaggctgtgacagggtctctccaggccacccaaatcatgcaatggcacgatcacagctcactgcacccttgacctcctaggctcgagcaatcctcccacctcagcctcctgagtagctagggatacaggcacacaccatgtctggcgaatattttagacagggattcgccatgttgcccaggctggtctcaaattcccgggctcaagtggttctcctgccttggcctctcaaagtgctgagattacaggtgtgagccaccatgcccagccgaaatacgttttcggtttatgctatttcaacttacagtgggcttcttgggctgaggagcaactggctttggcatagacagctgcctacctcattcacgtctggggacttcagcccagcccctacctggtttcctcttgagcaagtgctgtgcctcgatggcggtgatctgggacacagtagtgaagacgtgagcgcagtgggctgccgccctttccatgcagtatcggtggtagatctgcctctcccctgcttccttgtccacgttgaactgggtgggaggggacagcagtccggttagaaggattggggagaagactctggaggtccagacactggggtcccaagagaaattggtgctgggggctggattcctgggtctgaggtaggaggggtctggggacttggactcctggatcctgggagaagagggggtgccatccccttgggccccccagagctttgggttttcctggcatactcgcagtcccccatctgccacggtcccagctcacgttctccaggttgttgtagaagtccacggcaccggcacacaggtagcgccccagcagcgtggcatgggtggtgaagatggttgctacaggcagtcgccgggcacgacacaggcagagtccaacgcctgccaaccactcatggaagtgagcaaccacatgtggcttctcctcactctgtgccaggaactgtgggcaacagggacagggccactgtctccacgagtgttgggaaaagaatcggcaatccccagtagggacaaggactcggggagaggtcaatctgtcaccactactgcacagagtgggcagcggcccactgcagcaatcccaaccggacagggacctgtaaatccctgaggcagcccaggctggtcttgaactcctgggctcaagtgactgcctcctcaggggttgacaggaactgaggattttttggccaaccatctaagtcctggcagggttagattggacagactgaagttttcatgttcccaggtcctggacatagtttccaaagaccccttgtctcaagggtacgctgtctgcacccaacattggcaaagggactacaactcccagaatgccataggagcagccagttcctcaattatttgtcccagggcatgagaaattaagcttctttttttttttttctttttctttttttttttgagacagtgtctcactctgtggcccaggctggagtgccgtgatgcaatctcagctcactgcaattcccgcctcccaggttcaagcaattctcctgtctcagcctcccaagtagctgggatttgggattacaggtgcccaccaccacacccagctaatttttttgtatgtttagtaaagacgaggtttggccatcttgaactcctggcctcacgtgatcttcccccatcggcctcccaaagtgctgggattacaggcatgagccaccgtgcccagcctggaaactaagcttcttgagcctcttaaaacctagaagggggtcaaaaccaggtcaggctggggattcatgagcatccagggcagcatctgagagctgagtccagcaatatcacactagagaactacaactcctagaattcctcgggcaagcccgccagcctcactttgaggctgattccaagaatccctatgcttggaagactagagtaaatgaagttggcatcgagagtagagcctgggcccttggatgttcatgtcctcaaaggccagagctaatccttggattaaaggaccctatgactcccagaatgcccagggagaagcccatcctctggcccaggggctgatggtcattgtagtttcaggtatgggtggaatgtgtcagacggggcctacctcacccaggaaccaggtggtcagaaagccaaagaggacagcgtcgttggcctcgcggtcgtaccacggcactccgatgttgcaggtatcccagagctctcccttccagcgctccagggcccaagctgaggcacccacgtccaggagcaccaccagagggcctccctcgatcagccagcgcccgaaatacacctgggatggggttggggaggcaccatagggaggctctgggcttcagcctcatatcttcactcatccgtggttctcccatttgcaggcagatgtctatagacttaagcctcagctctcttatcttctgtttccatatctgctgctaatttctcacctgctgccttagccttacttctctatttgcatgatttattcctgctacacattttttccatctctgttgcaatattttccgtgccccctgcttactttctttctttcttttttttgagatggagtctcactctgtggcccaggctggagtgcagtggtgcgatctcagctcactgcaacctctgtctcccgggttcaagcaattctcctgcctcagcctcccaagtagctgggattacaggcacccgctcccacacctggctaattttttttttttcttgagacggagtctggctctgttgcccaggctggagtgccgtggcatgatctcggctcactgcaacctctgcctcctgggttcacaccattctcctgcctcagcctcccgagtagctgggactacagcggcccgccaccacgcccggctacttttttttgtattttcagtagagacgaggtttcactgtgt[139 bp omitted]tcctttctctgcttataaccacatatgtcacatgtcctgtgtctatgcccccactgccctgtctggccactctgcaaatcatttcccctacctgctgccttgtttctgtacttgctgccacatttctcttaccaaccatctgcatctcccactgtcttttctttctgatgctaattccttccacgggatgcttcttttttgttttcagacagggtctcgctctgttgcccaggctggagtgcagtggtgtgaacatggttcactatagcctcaacctccctggctcagtcaatcctcccacctcacctcctacaggcgtgggccaccatgccaggctgattttttaattttttgtggagatggggtctcactatgttgcccaggctgatcgtgaactcctgcgttcaagcagttttcttgcttagcctcccaaagtgttgagattagaagtgtgagccacctaaagcaggcccttttttattttcagagacggggtcttgctctgtcctccagcctggaagggagtggtgcaattacggttcactgaagcttcgatctcccaggctcaagcaatccttccaccgcagcttcccacgtagctgggaccacaggcacaaggtatcacatcccggctaatttttaacttttttgtaaggacagggtttcaccatgttgcccaggctggtctcaaactcctggcctcagcctaccaaagtgctgggattacaggcgtgagctactgcacccagcctgtaatgattctcttactgttcatgctgccacttttcttccccatgatgccttgtttctgttcctttcatcacatatctgtcacctgcgacctctttcctctatccataggcccattttgtagtccacagcctccttccttccttccttgcttccttccttccttccttccctctctccctccttccctccctctctcctttttctttctttcttccatttttttttgtttgtttttgtttttgacagggtctcactccggtcacccaggctggagtgcagtggtgcaatcatggctcactgggctgggcgcggtggctcacgcctgtaatcctagctctttggggggccgaggcgggcggattgcctgagctcaggagtttgagaccagcctgggcaacatggtgaaaccctgtctctactaaaatacaaaaaattagccgggcgtggcagcatgtgcctgaggtcccagctacttgggaggccgaggcaggagaattgcttgaacgcgggaggcggaggttgcagtgagtcgagattgtaccactgcactccagactcagcgacagagtgagattctatctgaaaaaaaaaaaaaaaaaattatggctcactacagcctccacatcccatcctcccacctcagcctcctgagtaactgggatcacgagcacgcaccatcatgcctggctaattttttgtatttttagtagagacagagtttcgccatgttgcccaggtgggtcaggaactcctgggctcaagctatcctctcacctcggcctcccaaagtgctgggattccaggcatgagccaccgccctcggccacgccacacatttctaacatagcccatcctctgtccgtgccccagggctgcatttttctagccactgccgtgtttctaagacttgctgtctcacttctgcctctgccacatttctccagttggctgttttcctccctgagaccatggctttggttctgggcctgctgccacagcagtggagaagcagccccgctcctcgccgacctggctttttgctgcctggagcctcgctctgaggtccctccccctcccagctgttgtctgcccttttgctgggggggggggggggctattcttaggcccccagcacgtgggaagcagctgccctcaggaagcgactgggctgttctgggttcccttagggacacagtcggacctgaatggattccagaccccaccccaaaccagaggctgtgaatgagtaaaggaaccacagtgcctctccatccccagcctggacctgtctgtcccttagccctgccgcctgatggctttctccttggacaacagcgtgccgcctgatggctttctccttggacaacagcgtgtctctttccgtcttcaccctggggccctggaactccccctcctctctaatccctgatctgcccatctcagactctgtcctgtgggtctgtccactgacctctcctctcttccccgatattccatgcttctctctccttctaggactggctttctgaaacatctggtggcctctcttctgtccccagtctattactcttgcctgtggctccatccacccttctcccttggtctgcctgtccccctcactctccaagcttggctgttagtaacaataatgacgatgatcataacaatgacaatcaccgcccacacaatgtgctaccttcatgccaagaactctactaaccactttgtccttattaactgtttcctcctcccagcaccgctagaaggtagacgctattagcatgtccattagccaaggacacacaggcagcaagtggagggtgaacttgaacttcaagctccagaatcctgctccttcctgacctcaggcccacttctccccagctctgcctggctggctggcattcttttctgagacagagtctcgctccgtcgcccaggctggagtgcagtggcccaatcgcagctcactgcaacctccgcctcccgggttcaagcgattctcctgcctcagcctcccgagtagctgggattacaggcacccgccaccacacccagctaatttttgtatttttggtagagacggggtttcgccatgttgaccaggctgtctttcgatcttgctctctttctctctgggtctgaggaccttggcctcttggatctccgtctcagtctgtctcatacttgccatctgtctgtccattcgcccatgtctgggatccacccacccacttccaggccctgcatctgtctgggtgtcctatcacgcctccttcctgtgtccaagcctgcctcgctctctggctggggctgtccaccctgcaccctctccgtctgtggctcccaccccgatggcaggctgtccacccgcttctgccctgggctgggccacgtcccaccttgcagcccttgctgttcatggaatccagtgtcctcttcagggccggggtgggggcctccagcagttccacctgggtcctcacgccctgctccgtgtacggccccaccaggaagtagttgtcgccccattcgtcccctgtcaccttcgccttcgtctgcagcaccgtgtagatgccacccactgtgggcccaagcgtgtgagggcaggccccggccgaggtccatagttctggggcctggggtggggtgggccggggatgtagggggcactcaggccccagacctctagctcagggggaagaggggactgggagcccatagtttggagtaggggttggaagcttggatgaggggaacacgagggctggagggcagtcctcctgggtctaagggagaagggggctggggtcaggaccctgaaggaggagggggctcaggctagacttctgggtctgagagagaaggggctgggtgccgggaccccttggtctgaaggaattaggcactggggctctaaggatggcagagctgaggactgactacccggactcaggttcccgagttcccagctcacaggagctgggtttaaatcgcagccaggctccaaaacccagtgagggagaccccctcatggccaatccagcttctcaccattgcccaagagaagcctgcatggtcattccctgcccccagggaccttgctgacctgcctcccaatttcctctccctgactagggacaccagcatgcagggctctgcctctcccatgaccctatcccagacccaggagccccagcccccagcctcctcccatcctggagcccaggccctggcgatacccggctgggtgttcacgggccccctctcctcctgggagacacagtccctttctcctccaagacccagcaaagcaaccccccagaccctgctctttgaggtgtgagattggcttgttcctggggatttcagccccagccttctccaaggccagaacctcagctttctgaagcccaagacacagaaatgcaggctcctagcccctcccatcctagggcccagcctctgactaacttaggacttcccagccttcccctattccagtacgcatgtgtcccaggccatgggctcctctactcctaggaactaatagctcaggccctcagctccttcaaagcccaggcattcattacagtctccagcccgtcccatctttattcttaagcagccagatcctcaggtcctcccaccgccgctcaggcctcctatctcccagtcagctctctctcaaatctggagttttatcccctagaccatgctgttagggtcataggtctgaaaccccggcagcttcccaggtttgcacgcagaaatcccatccccccatccccttccctgttcaggacccaggtatctagtctctcggaagcctgcctccaggacctaggagtctcattttagcgccctcttccctaggacccagaacccgggcttccagcctcctttcatcttaagtcaaacgaaccatccctctcccacccacctccggcttcccagcccctcctcaaggacacagcctccttgcccaggtcacaagggttcccctagtagccccgtcctcctacaactcagagttccgggcccccatccactactgtccttctcgtcaagggccccgacgcctggcgtgctcacccttgttagccacctcccaggccacttcgaagagcactgcgttctccaggtcgaattcatcctcccagtcctccagtcctggcagtgaggacatggacaaagtgcggtttaaaggcatggctggcgcaggaaggggggctccggggatctccaggtagggaccccggaggtgtctagggaatgcaccaggtagggtgcggggccgagtagctggtgcccgacgggaagcttgcaagacgctcggcttcctattgcaagaccgcacccctgccccgaagcgttgggacctaggcagaaggaggccgcagcgtcactgagcccactggcgcccctgcagtgaaacctcgcagccgccaggaggcggtggccgccccccccagccagcgccattggcccacgcccgggggcggggatttccgcgtgtcctcattggtggaacgggttggagtcgctgtgtcccggccccgcctcggccgtgagacctccagggggcggagcttgccgctgcgctttacggaaacgagtggccttcagctctgtcaatctggagctggaggcctcaaagtggggaggaggaggagggtgggataaagaggaaaggagcgtggaggacgtgtggttactcaaagaacagctaagaattttgcaatcggcctgagcggggcggtggtggggctgagcaaaaggaggaggagccaggagacattgggaatggacccaggagttccggacgcccgtcttccagcgcagcctcggtgggagggcggggcataaagtcccgccacgcccccacaatatttacatatttatgaggaaccatcgagatctttgaagaaccagctagcctagaggagccagaacatctcgctcctcgcgcgtttccgtttccgctaggactctggcagttggtgagcatcatggcaaccgttgtaagtgtgggtgcatggagggtgaggagcgagctagcagtctcgagtttgagagaggaggatgctggaggccctgactcctgggtctgagggaggggggatctgggggttcagactcctgggtctgaaagaggaggaagctcggccacccagatctgggggagaaggggacatgggggctggacttctggatctgaggcggggagggggctgggatcccagaatctcgggtctggccccatcatgctataggaactccaactttcaaaatcatcttggcgcaacggccggttccgcagtccttggcgccagtgtgtgatgaggagggttgtaggaccttgcgcttcgagccatttgggagccttggattgttagtggtgccaatggcacttgagttccaagctggaagcacaggcaggtacctgttcagtgtgtctgagagcgcgagggcgcctagtgagcctttagtgggaagaaattgtcgaggaacaagagagtcttagtggagaggactgaaggattagggacccagaaatcgggatcttgtcatgctaccgttttggccattttcatatttccagtatttcacacgggctacgtctcagtgtaaatgctcaataaattatcacttgaatatttgaatgaatgaatacatgtgaatgaaggagaggccaggaaacttggcctggcacct[136 bp omitted]ctattaaaaatacaaaaattagccaggtgtggtggtgcaggcctgtaatcccagctactcagaaggctgaggcaggagaatcgcttgaacctgggaggcagaagttgcagtgagccaagatcgcgccactgcattccagcctgggcgacaaagcgagactctgtctccaaaaaaaaaaaggtaatgtgacctgaacttagggactgggctgggcttacaggtgcctcaatttccatgatgagcccagtcaagatggaggaagggagggggagaaagttgttggtagctggggatgagatttgagtctgttgctgtcaccagggcaaggaggaggaggaggtggatagggaagtagaagaggaaggctatgaccagaactaccgtggagaaagtattggaagtatgaggggacggtgtgtgctgagttttgaaatgaccttggttttcatgggaacagcgggcagcaaggttttggagagacttatgatgaaagagaaagtctttataggagacagtccttggtaaggggcctgtttatgttgagagagctacatttgggattcctggattcatgtcttttttgtggggtggggatgcctagtcttctgcttgtagtctgggggtaatgttctatgctcctgggttccagcttcctataggagacggtaggtgggaaggttcacacagtgacagggaaagcttgtgaccattgatggccagaaagtctaaacgattggctccagagggaggaggcttcctctgggctggataactgcatgtcctctctaggggaagaagagaagaaagacctgtgggctgggcacagtggctcacgcctgtaatcccacactttgggagtccgaggtagaaggattgcttgagcccaggaatttaagactagccctggcaacatagcgaaaccctgtctctacaaaaaaataagaaaattaggccgggtgcggtggctcacacctgtaatcccagcactttggggggtcgaggcgggcaggtcatgaggtcaggagtttgagagcagcctggctaatatggtgaaaccccgtctttattaaaaatacaaaaaaaattagccgggcgtggtggcacatgcctgtagtcccaactactctggaggctgaggcaggagaattgcttgaacccgggaggcgaaggttgcagtgagccgagatcgcgccactgcactccagcctgggtgacagagtaaggctgtgtctcaaaaaaaaaaaaaaaagaaaagaaaagagaagaaaattagccaagtgtggtgggacacacctgtagtcccaactacttgggagactaaggtgggaggattgcttgagcctgggaggtggaggccacagcagtccagcctgggggacaaaatgagatcttatctcaaaaaaaaaaacacaaacctgtgggaaggaaggagacctggggatgggtggcctcggttagcatgctagcttcttaggcttccttttccttattagaaattatgaactattccaaagtgtcagaaaataatgtaacagacatgcaaagatccaccatccaggattgtttttttgttttttctttttttcaagacagagtctcactctgtctcccaggctggagtgcagtggtgtgatcttggctccctgcagcctctgcctctctcccatgttcaaatgatcctcctgcctcagcctcctgagtagctgggactacaggtgcgcgtcaccacgcccagctaatttttgtatctgtgtgtgtgtgtgtgtgtgtgtgtgtgtgtgtgtgtgttagtgatagagtcttgctctgatgcccaggctggagtgcagtggcgcgatctctgctcgctacaacctccgcctcctgggttcaagcaattctcctgcctcagcctcccaagtacctgggattacaggcacctgccaccacgcctggctaattttttgtatttttagtgtagactgggtttcaccatgttggccaggctagtctcgaactcctgacctcaagtgatccacctgccttgacctcccaaagtgctgggattacgggcgtgagccaccgtgcctgacctaatttttgtatttttagtagagacagggtttcaccatgttggccaggctggtctcgaacccctgacctcaagtgatttgcctgcttcagcctcccaaagtgctggtattacaggtgggagccactacgcccagcctgttgttttttttttttcttaatagctttattgagatagaattcacgtactacataattcacccatttaaagtatacagctcagtgttttctagtatattcacagacttgtgcagccatttccacagtcaattttagaacattgtcgtcaccccaaaaagaaaccccatgcctcttacctgtcaccgctaatccttccatacctcccatcttcagttctaggcagccactaatctttctctgtatatggatttgcctattgtggctacttcatatagatggaatcataccatatgtgtctttcgtgtgtggcttctttcagtcagtataatgttttcaaagttcatccacgttgtagcatgtatcagaactccattcctggccgggcgcggtggctcacgcctataaccccaacgctttggggtgccaaggcaggtggatcacctgaggtcaggagttcaagaccagcctggccaacatggtgaaaccccatctctactaaaaaatacaaaaaaatattagccaggtgtggtggcggacacctgtaatcccagctactcgggaggctgaggcagaagaatcacttgaacccaggaagcagaggttgtagtgagccaagattgcgccattgcactccagcctaggtgacagagtgagactatgtctcaaaaaaaaaaaaaaaagaaaagaaaaaagaactccattcctttttatgactgaataatattcctttgcacaaatagaccctgttttattttgccattcatcagctgatggacatgtgggttgtttctatcttttggctgttgtgaatagtgctgccgtgaacactcgtgtccatgttttgtgtggacctctgggggggtcctgaattgtcccgggtggtgtttactcacctccctcccccatgtgagaaggggtggtagctggctcctctctgtggagaactgtcaacatgggaagcctcggtatattcttgttgaatgagctcagcactttagagtatcacttagcaaaccacagacattgagtcccgaggtgaacaagagagaacaggccgtgcccttcatgggactcatgtccactggagcagagaatattgatccatccatctccctcgggaatgtgagatcacacagggagatcgggctcccagggaggcctttcatctgtctgaatgtctagaggtcctagaactagcctggcagggctgttggacagaaagggcctcccctagggggcagcacttgatctaattcagtgagagggcagggagagcagtctggactcaggggccagcatgtgcaaggcctggtggttgagaactggggccgcctggtacaagggatgctgggaaattagcaggggccagagcatgtccagctccatgcctgctcctcattggtgtctgtccttatggagctcacagttattagaaatggggaggacttgtctgggcacggtggttcacacctgtaatcccagcactttgggaggccttggtgggcagatcacttgaggtcaggagttcgagaccagcctggccaaccccagtagagatgggcgaaaccccatctctattaaaaatacaaaaaaaattagccaagtgtggtggtgtgcgcctgtagtcccagctactcaggaggctgaggcgggagaatcggttaaacccaggaggcggaggttgcaatgagctgagatcgggccactgcactccaacctgggcgacagagcagactccgtctcaaaaaataagaaaaaaaaaaaagaaatggggaggacttagccgggcacagtggctcacgcccataatcccagcactctgggaggccaaggctggtgtatcacttgaggccaggagtttgagaccagcctggccaacatggcaaaaccccatctctactaaaaatacaaaaattagccgggtgtgttgatgcgcgcctgtaatcccagctagtcaggaggctgaggcagagaatttcttgaacccaggaggcggaggttgcagtgagccgagattgggccactgcactccagcctgggtgacagagcgagacttcatctcaaaaaaaaaaaaagaaacagggaggatttcattcattcaccaaataaccaaatatgtgctggaccctgaggaccaagctgtcgatgagacagacagtccttgtcttcctggggctcaaccaaccagccattaggcagtgacaggcaagaggggtgggggtgactggtgcctgtcccatcgcctgcctgtgaggggaaggagtggaaaggaccatctcatgggagggacagaggaggggttggtgaaagctgggaccacactagtcctctgacacatcttcttgcacccccagacagccacaaccaaagtcccggagatccgtgatgtaacaaggattgagcgaatcggtgagtgagttgggtcaggaataggacctaagccctgcctgccatgtgccctgacagagcaaacctattgaggacccctaagatggagagggaggtggcctgcacaccaactgtgcccccactaccattcccccactcgccctatctaatgggggaggaggatcctcagttccagagttgggtcagatgatgcactggggaccaggctgctatcctggctatcctggtggggttcccgggtatgtttgcctggaagtcatagatatttactgggtgctttactgggtttggcctcgtatacccagtacacactgtggggtgagttccctgagggcagggacgaggtcgtgtcattcctagctgtgtccctagcacaggacctaacagagcagatgatcaagagataaccattgaatgcacgagtttgcgtcctgtggagccctcgcagtagccgcatgaggtgcatattgtaactgttagctgagggaactgattttcaggacagctaaatcactggccccggctcacacagagcaggaagttgagacgcagtgaggccagcagggtgcgctctcacaaagagctttaccggcagggaagtgaccgcattcattcatgcagcaggctcactgattcagggcatccgagaaaggcagtaagggcttctggctgtgaagatgggttttagaagcccagtgctggattcctggagcttagctctgccactttcccaccatgtggccagggactagttcctctctgtgcctcagtttccttatctgcaagacgaagctaagatagtttacctcatcagttaatgtaagattcagtaaggtagttcatataaagcattttgggtctgtgtgccaacactgtttcatctattaaaagtgctggggcactgggtgcagtggctcatgcctgtaattccagcactttggaaggccaaggtgggcggatcacctgaggtcaggaatttgagaccagcctggccaacatggtgaaacctcgtctctactaaaaatacaaaaatttgctgggcgtggtggcgcgtgcctgtaatcccagctactcgggaggctgaggcaggaaaattgcttgaacgaggaggtggaggttgcagtgagccaagatcatgccattgcactccagcctgggtgacaagagtgaaac[150 bp omitted]tctactaaaaatacaaaaattagccaggcatggtggtgcatgcctatagtcccagctactagggaggatggcttgaacctgggaggcagaggttgcagtgagccaatatcgtgccactgcactccagcttgggtgacagagtgactccatctcaaaaacaaacaaaaagtgccaagtatggccgggcatgatgggtcacgcctgtaatcctagcactttgagaggtggagtcaggaggattgcttgaatcaggagttcaagaccagcctgagtcacatagtgtgatcctgtctctaaaaaaaaaataaaaaaattagccggcagtggtggtccatgcctgagtcccagctacttgggagaactgcttgaaccaaggaggttcaggatgtggtgagatgtgactgcaccatgcactccagcctgggtgacagagtgagac[180 bp omitted]c[138 bp omitted]cctggccaaaaaacaataaaaaattaaaaaaaaaaaaaaaggatgaagagccaagcaccgcttgtgagctgaggacccagtagagactagctgcacccaggagcctcccttggggtgctcacagtcaagcactggggtcagcaaatctttccttattttattttatttttttttttgagacggagtctcattctgtcccccaggctggagtgcagtggcgcaatcttggctcactgcaagctccacctcccgggttcacaccattctcctgtcagccttccgagtagctgggactacaggcgcctgacaccacggccgtctaattttttatatttttagtagagacgtggtttcactgtgttagccaggatggtgtctatctcctgacctcgtgatccgcctgcctcggcctcccaaaatgctgggattacaggcgtgagccaccacgcctggaccctagcaaatctttcttaaagggtcagatggtaaatccttcctctgttgaaactactcaactctcctcttgcagtgcgaaggcagccacagacagtatataaatggcagtgttccaatacaaagattttttggttggttttttgttgttttttttttgagatggagtctcactgtgttgcccaggctggagtgcagtggggcgatctcagttcactgcaacctccacctccctggtttaagtgactctcatgcctcagcctcccgagtatctgagactacaggtgcatgccaccacgccaggctaatttttgtattttttagtagagacggggtttcaccatgttggccaggctagtctcgaactcctgacctcaggtgatctgcttgcctctgcctcccgaagtgctgggattataagcgtgagccaccgtacccagctccaataaaattttatttgcaaaaacaggtggctggcctccaggctgaggtttgctcaaccctcatctaatgtaaagcatgggaatcccatcttcccctctcgctggctgtgtggctggggcatgggacctaacctctctgagctccctccccattcatatcaataggttctgggactgttgccattttgatactcagaagtgctttcagggtgatagcagccagggctcttgtttcattttattttgttttactgagacaggtcttgctctgtcatccaggctagaatgcagtggcacaatcttggctcactgcaacctccgcctcccaggttcaagcaattctcctgcctcagcctcctgagaagctgggattacagtcatctgccaccatgcccagctaatttttgtatttttagtagagacagggt[131 bp omitted]atcatatggaataaactgagaacatgtgggtgctgtgtaaaccataaacatgaagtaattgtgatcattagcccttgtggttagatcttagtacaattatgtgcttaatcaggcctcagtgacttttgtttaactaggatgcatcctcagagcagctccagttcattgagcatttaccacattcagccatcttcctagggaggtgccaatttgggatatcctttccatgtgccccttcattcccccaacccctgctccctactcccacccacccctttgacaaagaaggaaaccagggctcagaggggtcaggccacatgtgcagcaagctggctagtaactgagtctttgttctttcccttcatgtaggtgcccactcccacatccggggactggggctggacgatgccttggagcctcggcaggtagagcagaggaggctggggtgtgagggcctctccatgaaggtcttgggtagtgggtacccagggtcctggggagtgtggggactatgttacggtcttctggacctttggctacatacccataaacttcaaccacatgtgggttttcttggtactaaagaattgattaggctaggtgtggtggctcatgcctgtaatctcagcactttgggaggccaaggtgggtggatcacctgaagtcagagtcaagaccagcctgaccaacatggtgaaaccctgtctctactaaaaatacaaaaattagccgggcatggtggtgcatgcctgtaattccagctactcaagagcctaaggcaggagaattgcttgaacctgggaggtggaggttgcaatgagccgagattgtgccactgccctccagcctgggtgacatctcggaaaaaaaaaaaaagaattgggagtgggtagcaattgctttgccaccttaaaaaaaagttagactgggtgcaatggctcacacttgtaatcccaatactttgggaggctgagatgggaagattgcttgagcctaagagcttgaggccagcctgggtaacatagtgacacctcctttctacaaaaaattttaaaaattagctggacatggtggtgcacatttgtggtcccagctactcaagaggctgaggtggaaggatctcttgatccctagaggtcaaggctacagt[131 bp omitted]gcttccatctcactagcttcctgatgtggtagaaatgccatggtagccccacaggaaatcacctcatgtgcgcctcccacccacaggcttcgcaaggcatggtgggtcagctggcggcacggcgggcggctggcgtggtgctggagatgatccgggaagggaagattgccggtcgggcagtccttattgctggccagccgggcacggggaagacggccatcgccatgggtaagaaacctcccagggcaggaactctcctgtttcctgctaaataactcctcctgtgtaagtcagggtcaggatgagccgcctttaacagatgacccaaaatggcagtggcttaaacactcaggattcattcttgcccatggaagaatctagaggtaggccatttggggcttattaagcagttccaggaagtcttccatcttcctgcctcaccatcctctgcacttggttccagtcaagaggacgccatgttccaagagggctgccagagctccagccttcccactcataacccaggcagcaggaagaaaggagttgccatgaggatgaaccccctcgagttggcttcctttaaacagtcattggaaatcctccatgcttctgcttatatctcattatctcattgactagaatgtaatcatatgatcacactctgcttcaggggaggctggcacattaaatgttttttaaaatttcataatttggaccatttttgccttaagaaaatgaggattcttctgttgggcaaaaggttgttgtaaaaataaaaaattaaaaaaaaaaaaacaggaaagaaaatgagggttctagaactaaggaagaaggggaaggtgggtattgaggagtcacccagcagtctttgttgcagtccgctagtggtttatgatcttttcactcccagctgttcctcttcttccttgttgaactcctatttatccttcaaaaccctacttcagcatctctgccccattgaagcttttcctaacccactgctcttcccactcactcccacctctgtgctgaggctggggccaggcagggagaatcagagtaacagccaggtcttcagtgaagataaagcagtgcctgttggggtgctcggactggacactggggacccatagatgagttagaccaaggcctgacttcaaagagctcctggtctggaggaggtggtcatggacacgatcccttccaaggcgacatgtgttacaatgcaggtagcatgtgacagaggaggctcctgaccttggtaggaaaacggggcatgtggtggcatttgttgctagaggcttccagagaagcggatacctgagctaagcctagtaggatggccaggaggctcctgggcggacactggggacagcatgtccaggcccagaatgtggcacacacagtaacttccttccctccatcctttctgctttcctactcttcttcatttttttttttttttgagacagtttcactctgtcgctcaggctggagtgcagtggtgtgatcttcgctcactgcaacctctgcctcctgggttcaagtgatcctcctgcctcaacctcccaagtagctgggattacagatgtgtgccaccacacccaactgatttttgtatttttagtagaaatgggatttcacca[134 bp omitted]gcctttcctcttcttgtgtctcccgcaggcctcctgcaggccaaaccctgtgctgggcagcactggggtgaggctagcctcgccctggcggggacgcttcttagtctagtgaaagaggcagagaggacccctggtgtccccagatggcatgggccgtgctcgtccactcagccctcagcagatacttgctgagttctgtgatgagggccattgtgtatccgcaaagaggactaagaacaggtcccacttgacactgggcaggagggtgtggtgtcagcctgtctgaaagggcgtgccccacattggaccaaaccttgtggccagggaactggaaggaaaggtctggcgttcagagctattgctggagacagacctgcttcctgccagccaccccaggccaccggcggtagagcgtcctgccctgtgccagtttcaggctgcgcaaccgtgttactgctgagcaccagtgcctgcctgcctgcctgcccatagtcactcctaagcagggtgtcatcccatgctggcacgtgttctgttatcatccccattagacagagggggagactgaggctcagggagcagttcagatcgctcaagatcccacggcgccacctgcacttaagtggtggatctgggatgggagccgaggcagtctgccttcatcacttgtagctatcgtgtgggctccttggccttcgtccctggtccccttcgtccagctctgaggctaaacagctcgtagaggctgggagactgaggtgtggcgaggttctagggtgtaccctctgggcaatgtgggattctaagccaggcctgccggagcaacctgccctgcctggcttctcactcactgtctgcctcatggctgaaccccgctctccagttccccctccccagcgctctgctcagctcggagccaagtccttacatgtaggatggcactgaaccctctttcctggggtgggagaaaagctagtttgccacagagcaggtgtcggggacctggtgccagagcggcttcacctacacagactgcctccttcccaggcatggcgcaggccctgggccctgacacgccattcacagccatcgccggcagtgaaatcttctccctggagatgagcaagaccgaggcgctgacgcaggccttccggcggtccatcggcgttcgcatcaagtaagcgggggacccgaggcgggtgccagaccccagagcctgggagcaaccccgcaccccgggcggctcgtcctttgtcccagagctcatggaaggttgtgattcccgagggtccaggtgtcaggctgtctcctcagatctgctctctggctagggaggagacggagatcatcgaaggggaggtggtggagatccagattgatcgaccagcaacagggacggtgagtctgtgtgagtctgtaccctgctgaggccacctccagcgccagggttggagagagtagatatcaggtctgcactgaggtcagaatcccatggaatgttctagctgcagactagagccatgtacatgcctacagtaggaggtcagttaacttgacaatggcttatccccttatgaaggacattatgggcaatagaaactgaggcggtaaaataatgagagagatctgttagtgagttcccaacagacctcaaaacccaacagacttcaaaactcgttccgtggccgaaaggcatgtcctgtccatcttacatgatacaggtgatttgctctctcttttttttttgttttcgagacagagtctccctctgtcccccagactggaatgcagtggtgcaatctcggctcactgcaacctctgcctcccaggttcaagtgattcttctgcctcagccttccgagtagctgagattacaggtgtgtgcatgccaccacgcccggctaatttttgtactttcagtagagacggggtttcaccatgttggccaggctggtcttgaactcctgacctcgtgatctgcccaccttggcctcccaaagtgctgggattacagccgtgagccaccatacctggcctctttttttttttttttttttttttttacaatttctgttttctcctttttgcatagctgtgttttctgattttgtgatcaacaaaaacactttttatttgggtataaaataggaatgtcaaagtgtgacatttggcaattttgcgagacctcgggcctatgttgtttttgatagactttattttttaggcatgttgtttgtttactatttttattttttatttttattttattttattataattttttttttgagatggagtcttgctctgttgcccaggctggagtgcagtggcacaatctcagctcacggcaagctctgcctcccgggttcatgccattctcctgcctc[199 bp omitted]gagttttggccaggcgcagtggctcacacctgtaatcccagcactttgggaggctgaggtgggcgatcacttgagatcaggagttcgaaacgagcctgactaacatggtgaaac[139 bp omitted]tctactaaaaatacaaaaaattagctgggcgtggtggtgggtgcttgtaatcccagctacttgggaggctaaggcaggagaatcgcttgaatctgggaggcagaagttgcagtaagccgagatcacaccattgcactccagcctgggcaacaagagcgaaactccatctcaaaaataaataaataataaaaacacaaaacaattagctgggtatggtggcacacatctgtaatcccagctacttgggaggctgaggcaggagaactacttgaacccgggagatggaggttggagtgagctgagatcacaccactgcactccagcctgggcgacagagcaagactctatctcaaaaaaaaaaaaaaaaa[131 bp omitted]aaaccccatctctactaaaaatacaaaaattagccatgcgtg[135 bp omitted]caaaaaaaaaaagaactttattgagttttaattgacatacagaaagctgtacacattgcaagtgtccagtatggtccgttgggacatacatgttcagccgcggagccatcaccgcgtcaggctggtgagcgcaccgtatgtcttccctggagagcttccttgtgttgtgcccattttgaagctgtggaagcagaggccagagcagagccagaagcttatcaacactgggggcactggggcaacatcagggccctctctgagccccatccctggcttgtccccactctcagggctccaaggtgggcaaactgaccctcaagaccacagagatggagaccatctacgacctgggcaccaagatgattgagtccctgaccaaggacaaggtccaggccgggtgagcagtcaggggccatgccaggcagccagggggatgggcgagcttgggcccattcctttccttaccctaccccccatccccctgtagggacgtgatcaccatcgacaaggcgacgggcaagatctccaagctgggccgctccttcacacgcgcccgcgactacgacgctatgggctcccaggtgcggccgggactcccgggatcccctcgcccccagcactggggtgttttcatctcctccatcacccccttgacccatggggtctggatcttcctgttaccctgactgtttgtcctggtactcctgggtcttccctgtaaccctaggacagcagggcccctcagcctggcactatagcttcgcatggccacatgtggcctgtggcttctaaggtcctccgggagcccccgtgaccctcagcgctctggaatgtccctagtcctgactacctcctgggcctggggtttccagatgaccccatttagcctcccagctccatttcctggagctccagtctcccccagacagagggctttaggggcccccttcatgcccttccctgccctgtctccgccgttcttcccccacccccgccccatagaccaagttcgtgcagtgcccagatggggagctccagaaacgcaaggaggtggtgcacaccgtgtccctgcacgagatcgacgtcatcaactctcgcacccagggcttcctggcgctcttctcaggtgaggcccctcctgccctgccctgccctgccctgccccaggcctagcagcctccctcgggctccctctgttcctgagctccgagtgtggcccacctgctccacgctgtttcctgtaactccggcccgtggctgcctctgttctccacctgcaagtccgctccgtccccacccctgctggtgctgtgatgggtgtggccctgccctctcccctcctgtgttctctgcctctgttcctcctctttggggatgtttcaggctcctcatccctccttgctttgctccccttcctccatccctggcatcatccttctctgtcttagccacactctggccctggaacccgcctcctctctggcttccctgatgcaacctgtgcctcccataggtgacacaggggagatcaagtcagaagtccgtgagcagatcaatgccaaggtggctgagtggcgcgaggagggcaaggcggagatcatccctggagtgaggacccaggacatggccggggcgggtggtggggtggaggtgggccggggaagtggggacgcgggtggtgactctcacacacaccccaatccaaggtgctgttcatcgacgaggtccacatgctggacatcgagagcttctccttcctcaaccgggccctggagagtgacatggcgcctgtcctgatcatggccaccaaccgtggcatcacgcggtgagccggctacaggggcctctggggaaaacaggatgctctgggcagtgggtgtggtcagagggtcaatgggagcctgtgttgacaccgggtcagggagggacgcgtgactgcagtgtgcgctctttgcttacaaaaggcgggtgggaggcagctctgcttcccgaggaagcccagagactgtgttcttgctgcctttctgtcttgctgctcctttagcccccaaggctgcagtcttcaaactgcgtgccgaggcaccccagggtgctgcaggaaactcacaggagtgctgtgggatgttttctagtcttgagggaagcacagtgacatctgttagacataacataaactacgattgttcagtcacttcgacccagcaactccattaacagaactcttagcgttgtgtttggcctaaggatgccagggacagattcccatgacacagagggtaccgtgctctgctgaagcctgggaacctcatctcccaggtgttgccagcaccctgtgcacggggaactcttaatgttgtgtttggcctgaggatgccggggacagattcctgtgacacagagggtactgtgctgtgctgaagcctgggaacctcgtctcccaggtgttgccagcaccctgtgtagctgggattacgggcacctgccaccatgcccgctggctgtcttctccacctcgccacattttggcccgcaggaagcagggggatgtggagggcaggcagcccccataggctgtgatccacaggctgcaccccaaccttgcacccccattccattgcccggcactgcttgggctcagtgctgtacctggtggcaaagaaggctgggtactgtcagctccagccctgcagccttgggcccagctgaaactgggcggttgggatgggcatcacaaaagggaagaagcgggcaccctacagaggatgctgggccgctgggcctggctctgtgtttggctcttttaactccttggatccgcagaagaagctcagaaggtagatatcacctcagccccattttatagggcaggacagtgaggcccagtgacttgcccaggtcacaagtctagaaggtagcagggccgtaatttggtctctggatggctggacactggaagagacccccagggctgatggtgttttcacagaaactgcaggtcagggcctggggactgcccaggggcacctcctgtgggaggcagcagctacgggcagccctgattgttcgtagactctgtatctgagaatctcgcttgctaagatttatttgtaatccccaaataaatatctgccctgctttcggcaacaaattcaagtcacctgacacccactttcccagctgagtgtgaacgaggcaacactgcctgctcccttagcgctcatgctgtaaataagtgtccttgttgtattctatttagtgctacgtttgtcacttttgttctttgagacagggtcttgctctgtcgcccaggctggagtgcagaggcacgatcatggcacactgcagcctcagtgcccaccacacacacacacacacacacacacacacacacacacacaccacccctgggactcaatcagtcctctggcctcagcctcctcatcagctgggaccacgggcatgcaccactatgcctagctaatttctgtttttgttttgagacggagtctagctctgtcaccaggctggagtgcagtggcacgatctcggctcactgcaacctctgccttctgggttcaagcagttttcctgcctcagcctcctgagtagctgggattatgggcacccgccaccatgcccagctaattttggtatttttagtagagacagggtttcaccatattggccaggctggtctcgaactcctgacctcgtgatctgcccacctcagcctcccaaagtgttgagattacaggggtgagtcaccgcgtccggcctaattttttttttttttttgtagagatggtgttttgccatgttgcccaggctggtctcaaactcctgggctcaagcaatccacccgcctcagcctcccaaagtgttgtcactttttttgtgccttttttttttaaactttttggggccatttgttggtgatattgccatttaaagtgtcccctgtgcacagtgttgaagtgctgtctagtatcctaagtgcaaggaggctgtgaagcctgacggagaaaatgccatgttacagacgcttcgctgagcccaagttagaatgctgttgacacgagctccatgttagagaataaacagtgatgttacataacaaa[131 bp omitted]aaaccctgtctgtattaaaaatagaaaaaactagctgggcgtgatggcgtgcgcctgtagacccagctacttgggaggctgaggcaggaggatcggttgaacccgggaggcggaggttgcagtgagccgagatcgcgccactgcactccagcctcgcaacagagcgagactccgtctcaaaaaacaaaccaaaaagaccagaaacacacaaatgaaaatacgcatagacccagattatatatatatggattgatgaaaatactgtaagccgaggctcgagagagcctaaccctgtattccagtaggagcagtggctcaggatcagctaattggagtgttcacgatgactttctagaacctcactactgtgaataaggggaactgactgtatcccctggcaccagccctgggctggccccgctgcagcagggaacaagacaggtgcagtcccctcctttgtgaagctttgtgtcgagcacgggagtgggaccttgatccagtaatcctggaggcagagatctagcttaaagcagcccagctccgcggaaaggtgcccttgggggactgacgcagctgtggaaggctgcgtcatcaggggtgatgtcatcatgtgacaggagacgcgagctaaaggttaagtggtgttgggcccagtgagtgggtggcgatgggaggtgagagtgttcccagcaaagggaatgaagagggaacatgcccctgacagccccctctttctgcctcttcctcagaatccggggcaccagctaccagagccctcacggcatccccatagacctgctggaccggctgcttatcgtctccaccaccccctacagcgagaaagacacgaagcagatcctccgcatccggtgcgggcaggaccaggccgtgcgcctgagacgcagggctggggtctaccctgtttgacaaatgctgacactgaggtccagcggagtggcatggtggctgggcctacaggagagagggctgagcgggcacccagacggtggcctccgatccgggagcaggagccacggtgggaaagggaggcgaggtacccgtgactggtgttggggccagcgccctgggggtggtcaggaggcctcggttttaggtccagcccagcccctgtctccgtggctcttctagcctcagcattctatggttctaagatgcaggcgccacatattcccagtggggaagggccagagggttgctgtggccacttctgctgcagtcagaggctgggccccggctgagccacccctgtcccccactgcttgcaggtgcgaggaagaagatgtggagatgagtgaggacgcctacacggtgctgacccgcatcgggctggagacgtcactgcgctacgccatccagctcatcacagctgccagcttggtgtgccggaaacgcaaggtcagccggccgaattagccagcagggccagatggcggcagtgagtgacacagtacttcaggggcttccagggttccgatttcatcctagaatgtacgttttcagacgcagggaattttcatccctcaggttggcttctgtatcatccagcctggcctatagtaggtatcagtaaatctctcttgacttaagtagatgctgttaggtccaccttacagataaagaaactgaggaatgaagaggctgggcccacaacaaggagatggccaggcaggatttgaacccaggcaatctggcccagaatgccctcccctcacatgccacactctgctgcctagagcatggaggtggcatacgctggggtctgtgccttgagcctcacggagaggggcccaactgaggactcgccctccccctccagggtacagaagtgcaggtggatgacatcaagcgggtctactcactcttcctggacgagtcccgctccacgcagtacatgaaggagtaccaggacgccttcctcttcaacgaactcagtaagaatccccaccccgcacctgcactgccagagccaacctcagagggaggaagagggagctcggcgtagaaggctcaggccctgccacctgggcgacactgaccatgtggccttccttctccccacagaaggcgagaccatggacacctcctgagttggatgtcatcccccgaccccaccctgttttccaccagagttctgacactgtgactctgtataaaatggttgggaagctgcacccaccctgtgtatgtgtggttgccctgagcccacagaaagacacctccagagtgcggattgagaagcctttattgtgggaggatcggggtgtcagggctccaggagtcgggatggacttggaaggctgcggggagggtctttagaggaagaggaggcctgagagttgggggtggtcacaggtcaaggggtggtctttgggacccccacagtcagaggtgctgcggcggcagggtccacagcgacagctgagagccacagggaaggagaccacggggtccacaccacgcgggcagccagggagccggatggactcgaagcgcacatcacggtaggtgcacaccacctgaggcaggggcggcaggaccgcctgcagcacgcgcatctggaggccgtgtgagtgggggaatgagcatgtgcctgaggccagcgcctcagctgagctcccaagctgaccccacaggtcctggactcaggagcccaggaagccctctgttcctgccttcccacaccccattccccaaccgcaggccagagaggcagaccacccttcctcccccgctgcctctgtgggtctggccctgaggtggcagcatctgcccctggccccaggcagctcaccatggtggggcagtagccggcacagatggtggtgttgacggtgatgcacactgggcagccctccttctcgacagccaggatggcattgatggggtggcaccatggccgaagcggctccctggatgcccatgccccgcccatgctcagcagcagcaacagcagcagcccctgggacaaggacactgcttcacccaggtctgagaccgcagccccgagtcctggccttcccatcccgcgtggtacaccacccacaaagacccagagacccttcccggcatctcctattcaggacccaccacccggacacctgcctttcagagcccaccccacagcccagaggacctgagatgccccaacatttcagatccccaccctcaggaactgccccacctgaagcttactgggggtcatgcccctccagaaagaggcctccttccacagctcacacgggtctgccccttctcatgccagtgatggcctggaaggaggtggaaggtgcccaggggccctgtagtcttacctggagcatctccatccttggtgcatcccctgcctcgtgtatctggctatatacctcggggttgtgggggcggcaaggccaccaggaggtgataggatgctggggtaacctggacactaatccccccgggggcgagaggtgcacatggccagggaggcgcaggagtggctcagcagagcgccccagccctctcccctcagtggtctagcgccagaggtgaggcagagaccacggtgaagtgacctcagagacccagttgtcgagtgctagggactagtcgagcctggaggcacagggagtagggtgtaggaaggcctgcctctgccaattgtggggtcttgggagccaggaggaggccatgacccgagaaaggtgctggactgaagcctcaaccctccacttgaggctttcctgcaccacagtccaacctaacaggaggggcgctgcttcggacttagcttctgcccagtgagagagggtctccccgtgactgtgctgccagggaagccacttgacccagatgcccccaaggagggattaagcccgagccccacctctcccttagggacctccgcccaccctaccctcaagccaggatgcccggagcgtccccggaagtgggtgtggttcaggtgatttaactcattatttaatacgcccgcagggtgcgtgtcttgcccccggggccacagcctgcaaggacattatctggacttagtcccctctccgtgatgccgcagctgagtgggtgtctgggctagtcccgcccccacgttgccaatagacgtaatgagtgcgactcaggctgggtccggaacccttcctagtgagcggaggtcccgagctccgctcggcagcgcggccctgggggcgggtctggggtggggctggccctgacggctcacaccagcgccggcttcaagctgccatagctggagttctcggtactgtaggctttcggcacgctgtagatgccccgcaggggcttccagtgcgggccgccccagggcgcctccagcgggcagaagcggtcgagccgccggagcgggtgcagcagggggctgtaggactcctgagccagagacagggctccccggtgcggcatggccgaggtcaccgggctgacgcgcggcacgcggacccgcggtggtcggggcggccgggaggagcgcggacagggcggccgctgcgggccgtggctccagacctggggcgtctcttcgaagctccagtaggtcagggagtccttgcgggggtatccggacagctccgtcctgtgggagcagggcgggatggtgaggatacagctggatccttggggacgagtttcagacctcgggatctaaggagtctgcacattcaaactcctgcatttccaggcgagcaccccttaggaaggacgcgacccggcacgcgttgcctgcgttcctgggtcctcgaggtacttaacgtcctggaaactgagctttcgcatcctagggaagtaaaaggggactttcgcttccttgggaaggagtatctgggggctcaagtaccgaaggaggccctgccctcagatccggaatcccctcgagccgctgtgcaggcttcctgtccctaccgcggttcctgagaggtgacactaaggactcctgggtgcttaaaaaaaaaagggaggggctgaggcctgaactttggttcttgctgctacagaagtcgaggctgagaccaccggctcagggaatgggagccagcccaggggctcggcgtgcaccggccacggcgggggctgtgcaggaggcggtgccgagcgagagcccggcttacttgggatagaaccgaaagtcccgcgccgaggtggtcagatagagctggcggcggtccaggacgccccggtcggatactgtgaaaggccggccagacagctcggggttcttcgtccaggcaattagagcctgagcaagattgggggaggaggcatacccaagacatagatttcataccccatcccaagccctgggtcccgagttcagaatccctctccttcggcctcgacagccatgacggccacggccctcacaccccgccccagggttagagcccttcctgccacccacgccagggaacttcagcttcctttctcatacccgaacccttcccagcctcacctccctaaatccaagcaccttctgctgttcaaggaactcaaacccaagcccccagccaccaaaaacaacctccctggttccgctctgtcttaaaccgtcttggtgtggccactggagctgagctgcatcttgggcagcaactccaagttacctctcccaactcccacctgaccccgtctcagaatattctagtctcctccccacccacagcccgccgtctagctccgcagcagcttaggagccctgaaggtgagtttgtagtccctggtccttctggcctggcctaatgcccagcccctcccccggctcctctaacctcgcgatcccgccccagaccctttagccacgccccaaagccgtgattccttctggccccgccccaggctcccggagctccgccccgtctcgccggcgccggcttccacccagacacctgggaaggacccccgcggtggtggtctgcgagttgtgggggctggggcccgaagtattccggggcgcgcgggtccccgctgggagagccagtgtactgcgccctcgtctcgctgctctggtactttgtggtcagtgggaggcgccagccgcggtgtctgagctgcggaaaggcgacccagagactcacgtgaaggagcaggggactcaaatgcagtcccccgccctgtcccctgcggactccggcactccccaaactttaccttttctcctaaatccttgatccccacagtccgcgtggggtctgcaggctctggggctctgggctgggcgcagggcccgccatgggtcttgggcacgtaggccgagccagaggttgtctcccatctgctgaggacctcgtcgaaagcccagttgtgagaatcctgctttgcaacttggggtagagggtccgcgaccgtggactggagagaaggcgccgcacatcagctagaaagactcaggagtccctatcaccccccaccccaaactctgacctcttccagtcggcccccagccctttcctctgcagtccctggcattcagcttccctggtgcctcctctctcagacccagaactccaggaccctcctccttcagagaggagtccaagctcccaatccgctttatttagcccctatctttctgggtctccaggcccggcagggctgcagcgtagggtccgctcacctgcaccgtgggcggggtgaagggtatgggtgggataatgcggtgggaaaagtagctgctggtgagatggcagttgggcctggatccaggtacctcggttgcagagatacgacagcccggagccagggtgccactggccatggttccacccccactccgtagccaagcaggagctggcttattgtggttgttgccccaggtgacagaacccgcccacccagaacctagtcaatcaagggcctgcaggcacctggatggatggaatgagaaagagacccagagacagggaccccaagaggggtacaaagaaacacaaggagggggaatggagactcaaagataggagggtggaaagggaaggagaagttcagtatttcagagacccagggggtgggggagagagaaacccaaaaagagggacagggacctggaggtgtcagagatccagacagagagacagagacccctgcgctgcacctagcaactcaggacatccatgagaaacacccccctttcttccagggcccagatgctcctggctgcttcctccctctaccaggcctgcccacctcagggtaacgatttccagacatccccggggctccccgaccctccctgcatgcacgtgctgaagtaatcagcactagcattggctgtcctgcctgcctttgattggcttgaaaagttccacctgggtaggcggggtgtggaaacagggaggcacccacagagaagtgcaccggaccatagcgaaaaacatgggctttgatgagtgagaaagaaatacaagagaggagagagacagggaggaagacacagaccacgctggaaacggagctattagtactcacccagaggctagagccaccggaagttagagacagagagaaaggcggcaaaaaagagcaaaatcagagatggtaacaaggagatgtagaaacggaggcagccacacccctccctgccgaggggcctggtctgtacagattggtggagggggtgcctatgtcctttgctcaaagctggacctgagagagagagagggggagagaaagtgagagagagagagtgtgtgtgtgtgtctgtgtctgtgtgttggcaacacatgtggggagatgggtaataggtaaagggctattgtgaagtcctgtggtctgtcccagacagagagaaagagagagagagagagagagacagagtgtgtgtgtgtgtgtgtgtctgtctgtgtgttggcaacacatgtggggagatgggtaataggtgaagggctattgtgaagtcctgtggaccagagagagagagagagagtgagtgtgtgtgtgtctgtatgtctgtgtgttggcaacacatgtagggagatgggtaataggggtcataggtgaagggctactgtgaactcctgtggtctgtccctggcttcccttgtcatttcttcaccatatagagcttttggtcaccgggcacgatgactcactcctgtaatcccagcactttgagaggcagaggcgggcagataacttgaggttaggagtttgaaaccagcctggccaacatggcaaaaccctgtctctatcgaaaaatataaaaagtagccaggcatggtggcgcacacctgtaatcccaactaaggcaggagaatcacttgaactcaggaggtgaaggtggcagtgagctgagatcatgccactgcactccagcctaggggacagagcaagactccatctcaaaaaaaaaaaaaaaaatagcttttggtctaggcctctgcctcctcaaccctcattatctcatcccacgagcccattcttcagacaaggaaacctgaggctgccttctgcagccaggcccacaatcccacttactgttcctccctgaatcatgcttctggggcccttctgttggattttgctgaccctactcaagggctctcaatgacgaataaccccctgatcctagccagggggacggcgagttagtcagaacctcatgtcccactcaaactggacaatttttttttttttttgagacggactttccctctttttgcccaggctggagtgcaatggcacagtctccgctcactgcaacctccgcctcccgggttcaagcgattctcctgcctcaccctccagagtagctgggattacaggcacccgcctacacgcccagctaatttctttatgtaattttagtagagacggggtttcaccatgttaaccaggctggtcttgaactcctaacctcaggtgattcgcctgtcttggcctctcaaagtgctgggattacaggcatcagccatcgcacctggccatcaagctggaaaattttaaggtctgtttctttcccaatgtagagtaaagttgcgatgtcatcccccgaccccacactgttttctaccagagttctcatactgtgactctgtataaaatggtttggaagctggacccatcctgtgtgtgtgtggttgccctgagcccacagaaagacacctccagagtgcggattgagaagcctttattgtgggaggatcggggtgtccgagggccccgggagtcgggatgggcttggaaggctggggggaggggcctttgaggaagaggagtcctggaagcgggggtcatcacaggtcaaggggtggtccttgggacccccgcagtcagtggtgctgcggcggcagagtgcacattgacagctgagagccacggcgtaggagaccacggggttcacgccgcgcgggcagccagggagccggatggactcgaagcgcacatcgcggtagttgcacaccacctgaggcagggccggcaggaccccctgcagcacgcgggtctggaagccgtgtgagtgggggaatgagcatgtgcctggggccagcgcctcagctgagctccccagctgcccccacaggtctcagactcaggggtccaggaagccctctgttcctgccctcccacaccccattccgcagcccctgaccagagaggcagaccacccttcctcccccgctgcctctgtgggtctggccctgaggtggcagcacctgccccggccccgggcagctcaccatggtggggcagtagccggcacagatggtggtgttgacggtgatgcacacggggcagccctccttctccacagccagggtggcattgatggggcggcaccgtggccgaagcggctccttggatgcccatgtcccgcccatgctcagcagcagcaacagcagcagcccctgggacaaggacactgcttcacccgggtctgagaccgcagccccgagtcctggccttcccatcccgcgtggtacaccacccacaaagacccagagacccttcccggcatctcctattcaggacccaccacccggacacctgcctttcagagcccaccccacagcccagaggacctgagataccccaacatttcagatccgcaccttcaggaaatgccccacctgaagcttactgggggtcacgctcctccagaaagaggcctccttccacagctcacactggtctgaccccttctcatgccagtgattgcctggaaggaggtggaaggtgcccaggggccctgcagtcttacctggaacatctccatccttggtgcgtcccctgcctcgtgtacctggctttatacctcggggttgtgggggcggcaaggccaccaggaggtgataggatgctggggtgagctcgacactaacccctcggggggcaagaggtagacaaggccaggggggcgcaggagtggctcagcggagcgccccagccctctcctctcactggtccagcgccaagggtgaggcggagaccacggtgaagtgacctcagagactcagtcgtcgagtgctagggactagtcgaggctggaggcacagggagtagggtgtaggaaggcctgcctctgcctatggtggggtcctgggagccaggaggaggccgtgacccgagaaaggtgctggactgaagcctcaaccctcctctacttgaggctttcctgcaccacagtccaacctcccaggaggggcgcggcttcggacttagtttctgcccaatgagagagggcctccccgtgactgtgctgccagggaagccacttgaccctggtgccgccaacgagggattcagcccgagccccacctctcccttagggacctccgcccaccctaccctcaagccaggatgcccggagctgtccccggaaatgcgtgtgcttcaggtgatttaactgattattgaataggcccgcaggaggtgtgtcctgcccatggggccgaagcctcggaggacattatctggacttagtcccttccccgcgatgccatcaagctggacaattttaaggtctgtttctttcccaatgtagggtataggttggcacagggaagagggctagaaacctgacttgagctccccgcccagggctgaactctccagcatcctgatcacttctcattgaaccttgcttatactccccgtgtgatcggtagctctttatctcaaaacagaatattctaagccaacccctgcctgctctcaccaagtaagatttctcatttgaaccccagctcccagatacttaaaggccttctgtagaccatgtcctcaaggtcccctggccatctgcttgcatgttccagtttccctcctcccccatgcacatcgtgaaatgtgccctcccactccccaggatgagcaaggtggtgtcctctgtgactgagcagtcagcaacttaacaccaaaggtcaccaatgatcaaatccatgagagttgatccgaggagttatgtattagggctacgaaagagtaaacactcagtaaatagtggctattattattatcatcatcatcatcatcatcatgattaccctcaagttcccctgggagagctcctattcaaccttcaaaaccacatgtggtggcacccatcctgcagagattgagctcaaattcagagagttgtgattttgtgatgatttgatgagttccccaactggggtccgtccgtagagcagctgggccaaccctgaggtctctcagcatccagctctgttctttttctgcctgaccagttcctgggtataagtctcaggcccggccagtccggctgaggagtgtgcagacacaggctgtgccagtttgaatccatcgccagtccacacggccctgggcatcagcggtcaatgcccgcacataggactgcttggccttgcactcagacacccagtgccccccggtccacaccccggcggcagccccctccacctacccccgggccaccttcctcagatttatcggcctcgaagtgggcaacaaagaagtgctggcggagggaactgccgacagctgcaggcacctcgcccaacacctccacctcgagcacacccaagtccacagcagtccaggggtctgtcacccagacactgactgcatcgcacacggccagctcaccctgatgactcgccggtgaagtatcgctcacccctcgctggctgcggttggcccgggcgcctgctgactcccgaaaggctccagtctccagcaggaagaccagagggggcccggcagcggcacccctagacaggaccactcgggggaaaagaaggtcccactctggaggaggaaaaggcgacaatgtcgaggatggggttaggactccattgacacactggggaggaggaaaatgagggggatgcggagggagcctgggggagtgggagcatctctcagagcatctctcagagcacatggagacagggaaaaggaggctgggattagagaagaggataaacacttcagtggggtcagaagttggaaaccccaggggaggcctgcctgccaggattatggggaagcccttgctctagaagtttgggggactccatatataggacttgcatcacacccaacttgtagattaataataaatattcaacaactacaggtcaggcactatggctcacacctgtaatcccagcactttgggaggctgaggcgggtggatgacttgaggtcaggagttcgagagcagcctggccaacactgtgaaacaacatctctactgataataccaaaattagccaggcctggtgctgcacgcctgtggtctcagctactcaggaggctgaggcaggagaatcgcttgaacccgggaggccgagattgcagtgagccaagatggtgccactgcacttccgcctggacaacagagtgagactctgtctcacaaaaaaaataaaaataaaaataaggccgggcatggtggctcacacttgtaatgccagcattgtcggaggctgcagtgggtggatcagctgaggtgaggagttccagaccagcctgaccaacatagagaaaccgcacctctactaaaaatacaaaatatcctccagcgtggtgctgcatgcttataatcccagctacttgggaggctaaggcaggagaatcacttgatcccaggaggcagaggttgcagtgagccaagatcgcgccattgcacttcagcttgggcaacaaaaacaaagctccatcttaaaaaaataataataataatcataaaataaagataaaaatgttcggccgggtgcagtggttcacgcctgcaatcccagcgctttgggaggccgaggtgggtgcatcacctgaggtcaagactttgagaccagcctggccaacatggtgaatccctgtctctactaaaaaaaaaacacaaaaattagctgggtatggtggtgcgcacctgtactcccagctactcaggaggctgaggcaggagaatcgcttggacccatgaagcagaggtgtagtgagccgagagcgcgccactgcactccagcctaggtgacagggccagactccgtctcaaaaaaaataaaaataaaaataaaataaaaataaaagtagaaaatattcaactactattactcaatagcaacagatggtaaaatacaggctcagagaaattaatgatttgtgcctggtcacacagccaacaaatggcagagatgggacttcacctctgggcaactgcactctgctatccttcctgtagaactctgaggaaccgagggtcttgcaccctggaggatgttccaatcaatttttttttgagggggtgtctcacttgtcgcccaggctggactgcagtggcgcgatctcggctaactgcaggtccacctcccgggtttacaccactctcctgcctcagcctcccgagtagctgggactacaggcacccaccactatgcctggctaatttgttgtattttttagtagagacggggtt[133 bp omitted]gcctcactctgtctggccaggctggagtacagtggcacaatcctggctcactgtagcgcctgcctcctgggttcaagtgactctcctgcctcagccttctgagtaactggaattacaagcgcctgccaccgtgccctgctaatttttgtatttttagtagagatgcagtttcacaacattggccagactggtctcaaactcccaacctccagtgatactcctgccctggcctcccagagtgctgggattataggcctgagaaaccacgcctggccccaaacaaattgctttaagacgaggtctccctatgtttccccactgcacttgaactcctgggctcaagccatcctcctgctgtggctcctgagtagctgggactacagactcaagccaccacgcctggccacattccacaatttagagaaagtgcacaacctggaatcctagggagaccccgattcacctcaaaactgccactaaggaggtaaaacgctgcccctctgaggcaggcttcagtttccctgtgtgtgaaattgacctggcgctgggagaggctggtggaggcgcggattttgcagtttccctacaacattctggaagcctgtggttctgggaaaggttggcgtggagaagactgggaaacaaccagtggtcaccagagctgtagcacctcctccacctccgagctctggggctgggaaccccaggcttcggggcccctgtggaggacgcaggtggccccctctttcctgacatctcaggagagggaggggcaaccggctagcagaagaaaagcacaggaaggttatacagccaggtggggaaggggccaaatccctgaacaaccccttcccagagttcctcttcaagtgcagggtacccaagagtcaaggccccgccccctttccagaggccccttttctacccaggtgatgggtcctagctgggatgggaggcagatggacggaggggaggggggaggaggggaagggagaggcagtggatgaaggaggatggaagagatgacatccccctcggcccattcatcccattcaggtccccaagccgcgcccctctccgccccacctgcactgccagtgccaacatcagagggaggaagagggagctcggcttagaaggctgaggccctgccacctgggccacaccgatcacgtggccttccttctccccacagaaggccagaccatggacacctcctgagctggaggtcatcctgcatctccaccctgttttctttttctttctttctttctttttttttttttttttgagatggagtctcgctctgtcgtggaggctggagtgcagtggcgcgatctctgctcactgcaagctccccctcctaggttcactccattctcctgcctca[133 bp omitted]ggcctcccaaagtggtgggattacaggagcgcagcaccacgcccagctaattttggtattaacagtagagatgttgtttcacagtgttggccaggctgcttttgaactcctgacctcaagtcaaacacccgcctcagcctcccaaagtgctgggaccacaggtgtgagccatagtgcctgacctgtagttgttgaatatttattattaatctacaagttgggtgtgatgcaagtcccatacatggagtcccccaaacttctagagcaagggcttccccataatcctggcaggcaggcctcccctggggttcccaacttctgacctcactgaagtgtttatcctcttctctaatcccagcctccttttccctgtttccatgtcctctgagagatgctcccgctcccccaggctccctctgcatccccctcatttgcttcctccccagtgtgtcaatggagtcctaacccccacccttgacattgtccccttttcctcctccagagtgggaccttattttcccccaagtggtcctgtctaggggtgccgctgccgggccccctctggtcttcctgctggagactggggccttttgggagtcagcaggcacccgggccaaccgcagccagcgaggggtgagcgatacttcaccggcgagtcatcagggtgagctggccgtgtgcgatgcagtcagtgtctgggtgacagacccccggaccgctgtggacttggttgtgctcgaggtggaggtgttgggtgaggtgcctgcagctggcagcagttccctccaccaacacttctttgtcacctgcttcaaggccgataactctgaagaaggtggcccaggggtaggtggaggggctgccgctggggtgtggaccggggggcactgggtgtctgagtgcaaggccaagcagtcctatgtgcgggcattgaccgctgatgcccagggccgtgtggactggcgatggattcaaactggcacagcctgtgtctgcacactcctcagccggactggccgggcctgagacttatacccaggaactggtcaggcagaaaaagaacagagctggatgctgagagacctcagggttggcccagctgctctacggacggaccccagttggggaactcatcaaatcatcgcaaaatcacaactctctgaatttgagctcaatctctgtaggatgggtgcaacaacgtggggttttgaaggttgaataggagctctcccaggggaacttgagggtaatcatgatgatgatgataataataatagccactatttactgagtgtttactctttcgtagccctaatacataactcctcggatcaactctcatggatttgatcattggtgacctttggtgttaagttgctgactgctcagtcacagaggacaccaccttgctcatcctggggagtgggagggcacatttcacgatgtgcatgggggaggagggaaactggaacatgcaagcagatggccaggggaccttgaggacatggtctacagaaggcctttaagtatctgggagctggggttcaaatgagaaatcttacttggtgagagtgggcaggggtcggcttagaatattttgttttgagataaagagctaccgatcacacggggagtataagcaaggttcaatgagaagtgatcaggatgctggagagttcagccctgggcggggagctcaagtcaggtttctagccctcttccctgtgccaacctataccctacactgggaaagaaacagaccttaaaattgtccagcttgatggcatcgcggggaagggactaagtccagataatgtcctctgaggctgaggcctcgggggcaggacacacctcctgcgggcctattcaataatcagttaaatcacctgaagcacacgcatttccggggaccgctccgggcatcctggcttgagggtagagtgggcagaggtccctaagggagaggtggggctcgggctgaatccctcgttggcggcaccagggtcaagtggctaacctggcagcacagtcacggggaggccctctctcattgggcagaaactaagtccgaagccgcgcccctcctgggcgaggaggttccacctcctaggttcctgtgattctcctgcctcagcccgagtagtgggacatcccacttgctcccgccattctgtttaccacaggtgacgaccgccatggctgacaggcagggaggtcccccgaggaccgagcaagcctcggtctcccaaaaaaaaaaaagatacattgaagtaatttaaaaacacttaggaagatgtcatttcttcctatcaaggcgtcctccctttatgttttgttattatatagggaacgataaaaaaatttttttctcaaccaatgtggacccggttggcctcgaactcgtaccctcgaaccctcccctccctgagggcccgagggcacgcgcaaccggtcggagccacaatagctcggggtgtcggggatctcctttcttccttttgaccttacgcagggtgatggagccaatcaggagaggctcacccctgacgtcacccagtccccagggccagtgagggccctgcgttccgtggcgccccctggagggaggaaggggaactgtatctgagagagagcagccaattgggtccgctgactccggccgggttcccgtgccgcgtccaacacccctcactccctgtctcactcccccacggagactcaatttactttccatgtccacatccccagtgcttgcggaagatatcccgctaagagagagacatgtcaaaggtagggtagatcgacatttccaggcaccaaagatggagatgttccaggaaagactgcagggcccctgggcaccttccacctgcttccaggccatcactggcatgagaaggggcagaccagtgtgagctgtggaaggaggcctctttctggaggagcgtgacccccagtaagcttcaggtggggcagttcctgagggtggggatctaaaatgttggggtatctgagatcctctgggctgtggggtgggctctgaaaggcaggtgtccgggtggtgggtcctgaataggagatgccacgaagggtctctgggtctttgtgggtggtgtaccacgcgggatgggaaggccaggactcggggctgcggtctcagacccgggtgaagcagtgtccttgtcccaggggctgctgctgttgctgctgctgagcatgggcgggacatgggcatccaaggagccgcttcggccacggtgccgccccatcaatgccaccctggctgtggagaaggagggctgccccgtgtgcatcaccgtcaacaccaccatctgtgccggctactgccccaccatggtgagctgcccggggccggggcaggtgctgccacctcagggccagacccacagaggcagcgggggaggaagggtggtctgcctctctggtcaggggctgcggaatggggtgtgggagggcaggaacagagggcttcctggacccctgagtctgagacctgtgggggcagctggggagctcagctgaggcgctggccccaggcacatgctcattctcccactcacacggcttccagacccgcgtgctgcagggggtcctgccggccctgcctcaggtggtgtgcaactaccgcgatgtgcgcttcgagtccatccggctccctggctgcccgcgcggcgtgaaccccgtggtctcctacgccgtggctctcagctgtcaatgtgcactctgccgccgcagcaccactgactgcgggggtcccaaggaccaccccttgacctgtgatgacccccgcttccaggcctcctcttcctcaaaggcccctccccccagccttccaagcccatcccgactcccggggccctcagacaccccgatcctcccacaataaaggcttctcaatccgcactctggcggtgtctttctgtgggctcagggcaaccacacacacagggtgggtccagcttccaaaccattttatacagagtcacagtacagaactctggtagaaaacagggtggacggctgggcgtggtg[131 bp omitted]gtggcgggcgcttgcaggagaatgcagtgaacctgggagcgggaggttgcagtgagcagagatcgcgccactgcactccagcctgcacgacagagcgagactccatctcaaaaaaaaaaaaaaaagaaagaaagaaagaaaaagaaaagagggtggagatgggggatgacatccagctcaggaggtgtccatggtctggccttccgtggggagaaggaaggccacacgattggtgtggcccagggggcagggcctcagcattctaagccgagctccctcttccaccctctgaggttggcactggcagtccaggtgggggcttggggacctgaatgggatgaatgggccaagggggatgtcatctcttccattctccttcatccactgcctctcccttcccctcctcccccccctcccacccccggtccatctacctcccatcccagccaggagccgtcacctaagtagaaaaggggcctctggaaagggggcggggccttgactcttgggtaccctgcgcttgaagaggaactctgggaaggggttgttcagggatttggccccttccccacctggctgtataaccttcctgttcttttcttcccctagccggttgcccctccctgtcctgagatgtcaggaaagagggggccacctgcgtcctccacagtggcctccgaagcctggggttcccagccccagagctcagaggtgaaggaggtgctacagctctggtgaccactggttgtttcccagtcttctccatgccaccctttcccaaaacaacaaaacaaacaaacaaaattgggcctggcgcagtggttcatgcctgtaatcccagcactttgggaagccgagacgggcggatcacaaagtcaggagatcaagactatcctggctaacatggggaaactccgtctctactaaaaaatacaacaaattagccaggcgtcctggtgggcgcctgtagtcccagctacttgggaggccgaggcaggagaatggcaggaacccgggaggcggatcttgcagtgagccgagatcgcgccactgcagtccagtctcaacaacagagcgagactccgtctcaaaaaaaaaaaaaaaattgattggaacatcctccaagatgcaagactctcagttcctcagagttctacaggaaggatggcagagtgcagttgcccagagttgaagtcccatctctgccatttgttggctgtgtgaccaggcacaaatcattaatttctctgagcctgtattttaccatctgttgctattgagtaatagtagtggactattttctatttttatttttattttatttattttatttttttttgagacggagtctcgccctgtcacccaggctggagtgcagtggcgtgatctcggctcactgcacctatgcttcccgggttcaagcgattctcctgcctcagcttcctgagtagctggaactacaggcgcgcaccaccacacccagctaatttttttttttttttttagtagagacagggtttcaccatgttggccaggctggtctcgaagtcctgaactcaggtgatgcacctgcctcggcctcccaaagtgctgggattgcaggcatgagccactgcgcctggacgaacgtttttaattatattattattattattattattattattattactaatttttgagatggagctttgtttttgttgcccaggctgaagtgcaatggcgggatcttggctcactgcaacctccgcctcctaggatcaagagattctcctgcctaagcctcccaagtacctgggagtataggcatgcaccaccacgcccgacgatattttgtaattttagtagagatggggtttctccatgttggtcatgttggtctggaacccctcacctcagctgatccacccaccgcagcctccgacaattacaggcgtgagccaccacgcccagccgtccaccctgttttctaccagagttctgtactgtgactctgtataaaatagtttggaagctggacccaccctgtgtgtgtgattgccctgagcccacagaaagacacctccagagtgcggattgagaagcctttattgtgggaggatcggggtgtcctagggccccgggagacgggatggacttggaaggctggggggaggggcctttgaggaagaggagtcctggaagcgggggtcatcacaggtcaaggggtggtccttgggacccccgcagtcagtggtgctgcggcggcagagtgcacattgacagctgagagccacggcgtaggagaccacggggttcacgccgcgcgggcagccagggagccggatggactcgaagcgcacatcgcggtagttgcacaccacctgaggcagggccggcaggaccccctgcagcacgcgggtctggaagccgtgtgagtgggggaatgagcatgtgcctggggccagcgcctcagctgagctccccagctgcccccacaggtctcagactcaggggtccaggaagccctctgttcctgccctcccacaccccattccgcagcccctgaccagagaggcagaccacccttcctcccccgctgcctctgtgggtctggccctgaggtggcagcacctgccctggccccgggcagctcaccatggtggggcagtagccggcacagatggtggtgttgacggtgatgcacacggggcagccctccttctccacagccagggtggcattgatggggcggcaccgtggccgaagcggctccttggatgcccatgtcccgcccatgctcagcagcagcaacagcagcagcctctggggcaaggacactgcttcacccgggtctgagactgcagcccccagtcctggccttcccatcccgcatggtacaccacccacaaagacccagagacccttcccggcatcttctattcaggacccaccacccggacacctgcctttcagagcccaccccacagcccagaggacctgagataccccaacatttcagatccgcaccctcaggaactgacccacctgaagcttactgggggtcacgctcctccagaaagaggcctccttccacagctcacacgggtctgccccttctcatgccagtgatggcctggaaggaggtggaaggtgcccaggggccctgcagtctttcctggaacatctccatctttggtgcccggaaatgtggatctaccctacctttgacatgtctctctcttagcgggatatcttccgcaagcactgggaatgtggacatggaaagtaaattgagtctccgtgggggagtgagacagggagtgaggggtgttggacgcggcacgggaacctggccagagtcagcggacccaattggctgctctctctcagatgcagttccccttcctccctccagggggcgccacggaacgcagggccctcactggccctggggactgggtgacgtcagggatgagcctcttgtgattggctccatcaccctgcgtaagatcaaagggaagaaaggatgggcccgacaaccggagccattgtggctccggccgattgagcctgccctcgggctctcaaggctaggcgagggtgtgagggactggagttcgaggtcaacctgggccccattggtaggaaaaaaaaaaaaaatttttttatcgttccctatataacaacaaaacataaagggaggacgccttgataggaagaaatgacatcttcctaagtgtttttaaattacttcaatgtatctttttttttttttttgggataccgagccttgctcggtcctcgggggacctccctgcctgtcagccatggcggtcgtcacctgtggtaaacagaatggcgggagcaagtgggatgtcccactactcgggctgaggcaggagaatcacaggaacctaggaggtggaacctcctcgcccaggaggggcgcggcttcggacttagtttctgcccaatgagagagggcctccccgtgactgtgctgccaggttagccacttgaccctggtgccgccaacgagggattcagcccgagccccacctctcccttagggacctctgcccactctaccctcaagccaggatgcccggagcggtccccggaaatgcgtgtgcttcgggtgatttaactgattattgaataggcccgcaggaggtgtgtcctgcccccgaggccgcagcctcggaggacattatctggacttagtcccttccccgcgatgccatcaagctggacaattttaaggtctgtttctttcccaatgtagggtataggatggcacagggaagagggctagaaacctgacttgagctccccgcccagggctgaactctccagcatcctgatcacttctcattgaaccttgcttatactccccgtgtgatcggtagctctttatctcaaaacagaatattctaagccaacccctgcctgctctcaccaagtaagatttctcatttgaaccccagctcccagatacttaaaggccttctgtagaccatgtcctcaaggtcccctggccatctgcttgcatgttccagtttctctcctcccccatgcacatcgtgaaatgtgccctcccactccccaggatgagcaaggtggtgtcctctgtgactgagcagtcagcaacttaacaccaaaggtcaccaatgatcaaatccatgagagttgatccgaggagttatgtattagggctacgaaagagtaaacactcagtaaataatggctattattattatcatcatcatcatgattaccctcaagttcccccgggagagttcctattcaaccttcaaaaccccacattgttgcacccatcctacagagattgagctcaaattcagacagttgagattttgcgatgatttgatgagttccccaactggggtccgtccgtagagcagctgggccaaccctgaggtctctcagcatccagctctgttctttttctgcctgaccagttcctgggtataagtctcaggcccggccagtccggctgaggagtgtgcagacacaggcagtgccaatttgaatccatcgccagtccacacggccctgggcatcagtggtcaatgcccgcccataggactgcttggccttgcactcagacacccagtgccccccggtccacaccccggcggcaggtcctccacctacccccgggccaccttccttagatttatcggcctcgaagcgggtaacaaagaagtgctggcggagggaactgctgccagctgcaggcacctcacccaacacctccacctcgagcacacccaagtccacagcagtccaggggtctgtcacccagacagtgactgcatcgcacacggccagctcaccctgatgactcaccggtgaagtatcgctcaccccacgctggctgcggttggcccgggcgcctgctgactcccgaaaggctccagtctccagcaggaagaccagagggggcccggcagcggcacccctagacaggaccactcgggggaaaagaaggtcccactctggaggaggaaaacgcgacaatgtcgaggatggggttaggactccaatgacacactggggaggaggaaaatgagggggatgcggagggagcctgggggagcaggagcatctctcagagcatctctcagagcacatggagacagggaaaaggaggctgggattagggaagaagataaacacttcagtggggtcagaagttgggaaccccaggggaggcctgcctgccaggattatggggaagcccttgctctagaagtttgggggactccatataaaggacttgcatcacacccaacttgtagattaataataaatattcaacaactacaggtcaggcactatggctcacacctgtagtcccagcactttgggaggctgaggcgggtgtttgacttgaggtcaggagtttgagagcagcctggccaacactgtgaaacaacatctctactgataataccaaaattagctgggcgtggtgctgcgctccagtaatcccaccactttgggaggcc[133 bp omitted]tgaggcaggagaatggagtgaacctaggagggggagcttgcagtgagcagagatcacgccactgcactccagcctccacgacagagcgagactccatctcaaaaaaaaaaaaaagaaagaaagaaagaaaaagaaaacagggtggagatggaggatgacctccagctcaggaggtgtccatggtctggccttctgtgggggaaggaaggccacatgatcggtgtggcccaggtggcagggcctcagccttctaagccgagctccctcttcctccctctgacgttggcactggcagtgcaggtggggcggggtggggggcgcggcttggggacctgaatgggatgaatgggccgagggggatgtcatctcttccatcctccttcatccactgcctctcccttcccctcctcccccctcccctccgtccatctgcctcccatcccagctaggacctgggtagaaaaggggcctctggaaaggggacggggccttgactcttgggtaccctgcacttgaagaggaactctgggaaggggttgttcagagatttggccccttccccatctggctgtataaccttcctgtgcttttcttctgctagccggttacccctccctctcctgagatgtcaggaaagagggggccacctgcgtcctccacagtggtccccgaagcctggggttcccagccccagagctccgaggtggagggggtgctacagctctggtgaccactggttgtttcccagtcttctccacgccaacctttcccagaaccacaggcttccagaatgttgtagggaaactgcaaaatccgcgcctccaccagcctctcccagcgccaggtcaatttcacacacagggaaactgaagcctgcctcagaggggcagcgttttacctccttagtggcagttttgaggtgaatcggggtctccctaggattccaggttgtgcactttctctaaattgtggaatgtggccaggcgtggtggcttgagtctgtagtcccagctactcaggagccacagcaggaggatggcttgagcccaggagttcaagtgcagtggggaaacatagggagacctcgtcttaaagcaatttgtttggggccaggcgtggtttctcaggcctataatcccagcactctgggaggccagggcaggagtatcactggaggttgggagtttgagaccagtctggccaatgttgtgaaactgcatctctactaaaaatacaaaaattagcagggcacggtggcaggcgcttgtaattccagttactcagaaggctgaggcaggagagtcacttgaacccaggaggcaggcgctacagtgcgccgggattgtgccactctactccagcctggccagacagagtgaggctct[132 bp omitted]aaaccccgtctctactaaaaaatacaagaaattagccaggcatggtggcgggcgcctgtagtcccagctactcgggaggctgaggcaggagagtggtgtgaacctgggaggcggagcttgcagtgagccgagattgagccactgcagtccagcctgggtgacaagtgagactccccctgaaaaaaaaaaaaattgattggaacatcctccaggatgcaagactctcggttccttagagttctacaggaaggatggcagagtgcagtcgcccagaggtgaagtcccatctctgccatttgttggctgtgtgaccgggcacaaatcattactttctctgatcctgtattttaccatctgttgctattgagtaatagtagttgactattatgtatttttatttatttttatttttatttttatttttgtttgagacagagtctggccctgtcacccaggctggagtgcagtggtgcgctcttggctcactgcatctctgcttccggggttcaagcgattctcctgcctcagcctcctgagtagctgggagtacaggtgcccaccaccacacccagctaatttttgtattttttttagtagagacagggattcaccatgttggccaggctggtctcaaagtcctgacctcaagtcatccacccgcctcagcctcccaaagtgctgggattacaggtgtgggccataatgcctgacctgtagttgttgaatatttactattaatctacaagttgggtgttatgcaagtcctatatatggagtcccccaaacttctagagcaagggcttccccataatcctggcaggcaggcctcccctggggttcccaacttctgaccccactgaagtgtttatcctcttctctaatcccagcctccttttccctgtctccatgtgctctgagaggtgctctgagagatgctcccgctcccccagactccctctacatccccctcattttcttcctctccagtgtgtcaatggggtcctaaccccaccctcgacattgtcgccttttcctgatccaaagtgggaccttcttttcccctgagtggtcctgcctaggggtgccgctgccgggccccctctggtcttcctgctggagactggggcctttcgggagtcagcaggcgcccgggccaaccgcagccagcgaggggtgagcaatacttcactggcgagtcatcagggtgaggctggccgtgtgtgatgcagtcactggctgggtgacagacccccggaccgctgtggactcaggtgtgctggaggtggaggtgttgggcgaggtgcctgcagctggcggcagttccctctgccaacacttctttgtcacctgcttcgaggccaataactctgaagaaggtggcccaggggtaggtggaggggctgccgcagggtgtggaccggggggcactgggtgtctgagtgcaaggccaagcagtcctatgtgcgggcattgaccgctgatgcccagggctgtgtggactggtgatggattcaaattggcactgcctgtgtctgcacactcctcagccggactggccgggcctgagacttatacccaggaactggtcaggcagaaaaagaacagagctggatgctgagagacctcagggttggcccagctgctctacggaccccagtttgggaactcatcaaatcatcacaaaatcacaactctctgaatttgagctcaatctctgcaggatgggtgccaccacatggggttttgaaggttgaataggagttctcctgggggaacttgaggataatcatgatgatgatgataataataataggcactatttactgagtgtttactctttcttagccataatacataactcctcggatcaactctcatggatttgatcattggtgacctttggtgttaagttgctgactgctcagtcacagaggacaccaccttcctcatcctggggagtgggagggcacatttcacgatgtgcatgggggaggagagaaactggaacatgcaagcagatggccaggggaccttgagaacatggtctacagaaggcctttcagtatctgggagctggggttcaaatgagaaatcttacttggtgagagtgggcaggggtcggcttagaatattttgttttgagataatgagctaccgatcacagggggagtttaagcaaggttcaatgagaagcgatcaagatgctgcacagttcagccctgggtggggagctcaagtcaggtttctagccctcttccctgtgccaacctataccctacattgggaaagaaacagaccttaaaattgtccagcttgatggcatcgcggggaagggactaagtccagataatgtcctctgaggcttcggccccgtgggcaggacacacctcctgcgggcctattcaataatcagttaaatcacctgaagcacacgcatttccggggaccgctccgggcatcctggcttgagggtagagtgggcggaggttcctaagggagaggtggggctcgggctgaatccctcgttggggggcatctgggtcaagtggcttccctggcagcacagtcacggggaggccctctctcattgggcagaagctaagtccgaagccgcgcccctcctgggaggttggactgtggtgcaggaaagcctcaagtagaggagggttgaggcttcaatccagcactttgctcgggtcacggcctcctcctggctcccaggaccccaccataggcagaggcaggccttcctacaccctactccctgtgcctccaggctcgactagtccctagcactcgacgactgagtctctgagatcacttcaccgtggtctccgcctcacccttggcgctggaccagtgagaggagagggctggggcgctccgctgagccactcctgcgcccccctggccttgtctacctcttgccccccgaagggttagtgtcgagctcaccccagcatcctacaacctcctggtggccttgccgcccccacaaccccgaggtataaagccaggtacacgaggcaggggacgcaccaaggatggagatgttccaggtaagactgcagggcccctgggcaccttccacctccttccaggcaatcactggcatgagaaggggcagaccagtgtgagctgtggaaggaggcctctttctggaggagcgtgacccccagtaagcttcaggtggggcagttcctaagggtggggatctgaaattttggggcatctcaggtcctctgggctgtggggtgggctctgaaaggcaggtgtccgggtggtgggtcctgaataggagatgccgggaagggtctctgggtctttgtgggtggtgtaccacgcgggatgggaaggccaggactcggggctgcggtctcagacccgggtgaagcagtgtccttgtcccaggggctgctgctgttgctgctgctgagcatgggcgggacatgggcatccaaggagccgcttcggccacggtgccgccccatcaatgccaccctggctgtggagaaggagggctgccccgtgtgcatcaccgtcaacaccaccatctgtgccggctactgccccaccatggtgagctgcccggggcccgggcaggtgctgccacctcagggccagacccacagaggcagcgggggaggaagggtggtctgcctctctggtcaggggctgcggaatggggtgtgggagggcaggaacagagggcttcccggacccctgagtctgagacctgtgggggcaactggggagctcagctgaggcgctggccccaggcacatgctcattcccccactcacacggcttccagacccgcgtgctgcagggggtcctgccggccctgcctcaggtggtgtgcaactaccgcgatgtgcgcttcgagtccatccggctccctggctgcccgcgcggcgtgaaccccgtggtctcctacgccgtggctctcagctgtcaatgtgcactctgccgccgcagcaccactgactgcgggggtcccaaggaccaccccttgacctgtgatgacccccgcttccaggactcctcttcctcaaaggcccctccccccagccttccaagtccatcccgactcccggggccctcggacaccccgatcctcccacaataaaggcttctcaatccgcactctggaggtgtctttctgtgggctcagggcaatcacacacacacaggatgggtccagcttccaaaccattttatacagagtcacagtacagaactctggtagaaaacagggtggacggctaggcgcggtggctcacgcctgtaattgtcggaggctgtggtgggtggatcagctgaggtgaggggttccagaccagcctgaccaacatggagaaaccccatctctactaaaaatagaaaacatcgtcgagcgtggtggtgcatgcctatactcccaggtacttgggaggctaaggcaggagaatctcttgatcctaggaggcggaggttgcagtgagccaagatcccgccattgcacttcagcctgggcaacaaaaacaaagctccatctcaaaaagtaataataataataataataaaataaaaattaaaaacgttcgtccaggcgcagtggctcatgcctgcaatcccagcactttgggaggctgaggcgggtgcatcacctgagttcaggactttgagaccagcctggccaacatggtgaaaccctgtctctactaaaaaaaaaaaaaaattagctgggtgtggtggtgcgcgcctgtagttccagctactcaggaagctgaggaaggagaatgacttgaaccccggaagcataggtgcagtgagctgagatcacgccactgcactccagcctgggtgacagggtgagactccgtctcaaaaaaaataaataaataaaataaaataaaaataaaaatagaaaatagtccactactattactcaatagcaacagatggtaaaatacaggctcagagaaattaatgatttgtgcctggtcacacagccaacaaatggcagagatgggacttcaactctgggcaactgcactctgccatccttcctgtagaactctgaggaactgagagtcttgcatcttggaggatgttccaatcaatttttttttttttgagacggagtctcgctctgttgttgagactggactgcagtggcgcgatctcggctcactgcaagatccgcctcccaggttcctgccattctcctgcctcggcctcccaagtagctgggactacaggcgcccaccaggacgcctcgctaatttgttgtattttttagtagagacggggtttccccgtgttagccaggatagtcttgatctcctgactttgtgatccgcccgtctcggcttcccaaagtgctgggattacaggcatgaaccactgcgccaggcccaattttgtttgttttgttttgttttgttgtttttggaaagggtggcatggagaagactgggaaacaaccagtggtcaccagagctgtagcacctccttcacctctgagctctgctgggaaccccaggcttcgggggccactgtggaggacacaggtggccccctctttcctgacatcgcaggagagggagcagcaaccggttaggggaagaaaagcacaggaaggttatacagccaggtggggaagaggccaactccctgaaaaaaccccttcccagagttcctcttcaagcgcagggtacccaagagtcaaggccccgccccctttccagaggccccttttctacttaggtgatggctcctggctgggatgggaggtagatggaccgggggtgggaggggtggaggaggggaagggagaggcagtggatgaaggagaatggaagagatgacatcccccttggcccattcatcccattcagatccccaagcccccacctggactgccagtgccaacctcagagggtggaagagggagctcggcttagaatgctgaggccctgctccctgggccacaccaatcgtgtggccttccttctccccacggaaggccagaccatggacacctcctgagctggatgtcatcccccatctccaccctcttttctttttctttctttctttcttttttttttttttttgagatggagtctcgctctgtcgtgcaggctggagtgcagtggcgcgatctctgctcactgcaacctcccgctcccaggttcactgcattctcctgcaagcgcccaccac[131 bp omitted]caccacgcccagccgtccaccctgttttctaccagagttctgtactgtgactctgtataaaatggtttggaagctggacccatcctgtgtgtgtgtggttgccctgagcccacagaaagacacctccagagtgcggattgagaagcctttattgtgggaggatcggggtgtccgagggccccgggagtcgggatggacttggaaggctggggggaggggcctttgaggaagaggagtcctggaagcgggggtcatcacaggtcaaggggtggtccttgggacccccgcagtcagtggtgctgcggcggcagagtgcacattgacagctgagagccacggcgtaggagaccacggggttcacgccgcgcgggcagccagggagccggatggactcgaagcgcacatcgcggtagttgcacaccacctgaggcagggccggcaggaccccctgcagcacgcgggtctggaagccgtgtgagtgggagaatgagcatgtgcctggggccagcgcctcagctgagctccccagctgcccccacaggtctcagactcaggggtccgggaagccctctgttcctgccctcccacaccccattccgcagcccctgaccagagaggcagaccacccttcctcccccgctgcctctgtgggtctggccctgaggtggcagcacctgccccggccccgggcagctcaccatggtggggcagtagccggcacagatggtggtgttgacggtgatgcacacggggcagccctccttctccacagccagggtggcattgatggggcggcaccgtggccgaagcggctccttggatgcccatgtcccgcccatgctcagcagcagcaacagcagcagcccctgggacaaggacactgcttcacccgggtctgagaccgcagccccgagtcctggccttcccatcccacgtggtacaccacccacaaagacccagagacccttcccggcatctcctattcaggacccaccacccggacacctgcctttcagagcccaccccacagcccagaggacctgagataccccaacatttcagatccccaccttcaggaaatgccccacctgaagcttactgggggtcacgctcctccagaaagaggcctccttccacagctcacactggtctgccccttctcatgccagtgattgcctggaaggaggtggaaggtgcccaggggccctgcagtcttacctggaacatctccatccttggtgtgtcccctgcctcgtgtacctggctttaaacctcggggttgtgggggcggcaaggccaccaggaggttgtaggatgctggagtgagctcgacactaacccttcggggggcaagaggtagacaaggccaggggggcgcaggagtggctcagcggagcgccccagccctctcctctcactggtccagcgccaagggtgaggcggagaccacggtgaagtgacctcagagactcagtcgtcgagtgctagggactagtcgagcctggaggcacagggagtagggtgtaggaaggcctgcctctgcctatggtggggtcctgggagccaggaggaggccgtgacccgagaaaggtgctggactgaagcctcaaccctcctctacttgaggctttcctgcaccacagtccaacctcccaggaggggcgcggcttcggacttagcttctgcccaatgagagagggtctccccgtgactgtgctgccagggaagccacttgaccctggtgcccccaaggagggattcagcccgagccccacctctcccttagggacctccgcccactctaccctcaagccaggatgcccggagctgtccccggaaatgcgtgtgcttcaggtgatttaactgattattgaataggcccgcaggaggtatgtcctgcccacggggccgaagcctcggaggacattatctggacttagtcccttccccgcgatgccatcaagctggacaattttaaggtctgtttctttcccaatgtagggtataggttggcacagcaaagagggctagaaacctgacttgcgctccccacccagggctgaactgtgcagcatcttgatcgcttctcattgaaccttgcttatactccccctgtgatcggtagctcattatctcaaaacagaatattctaagccaacccctgcctgctctcaccaagtaagatttctcatttgaaccccagctcccagatacttaaaggccttctgtagaccatgtcctcaaggtcccctggccatctgcttgcatgctccagtttctctccacccccatccacatcgtgaaatgtgccctcccactccccaggatgagcaaggtggtgtcctctgtgactgagcagtcagcaacttaacaccaaaggtcaccaatgatcaaatccatgagagttgatctgaggagttatgtattagggctacgaaagagtaaacactcagtaaatagtggctattattatcatcatcatcatcatgattactctcaatttccccctggagaactcctattcaaccttcaaaaccccacgtggtggcacccatcctgcagagactgagctcaaattcagagagttgtgattttgtgatgatttgatgagttcccaaactggggtccgtagagcagctgggccaaccctgaggtctctcagcatccagctctgttctttttctgcctgaccagttcctgggtataagtctcaggcccggccagtccggctgaggagtgtgcagacacaggcagtgccaatttgaatccatcgccagtccacacggccctgggcatcagcggtcaatgcccgcacataggactgcttggccttgcactcagacacccagtgccccccggtccacaccctggcggcagccccctccacctaccccacggctaccttcctcagagttatcggcctcgaagcggtgacaaagaagtgctggcagagggaactgccgccagctgcaggcacctcgcccaacacctccacctcgagcacacccaagtccacagcggtcccgggatctgtcacccagacactgactgcatcacacacggccagcctcaccctgatgactcgccggtgaagcatcgctcgcctcacgctggctgcggttggcccgggcgcctgctgactcccaaaaggccccagtctgcagcaggaagaccagagggggcccggcagcggcacccctagacaggaccactcaggggaaaagaaggtcctactttggatcaggaaaaggtgacagtgccgagggtggggttaggaccccattgacacactggggaggaagaaaatgagggggatgcagagggagcctgggggagcgggagcatctctcagagcacctctcagcacacggagacagggaaaaggaggctgggattagagaagaggataaacacttcagtggggtcagaagttggaaaccccaggggaggcctgcctgccaggattatggggaagcccttgctctagaagtttgggggactccatataaaggacttgcatcacacccaacttgtagattaataataaatattcaacaactacaggtcaggcactatggctcacacctgtagtcccagcactttgggaggctgaggcgggtggatgacttgaggtcaggagttcgagagcagcctggccaacactgtgaaacaacatctctactgataataccaaaattagccaggcctggtgctgcacgcctgtgatctcagctactcgggaggctgaggcaggagaatcgcttgaacccgggagggctgagattgcagtgagccaagatcgtgtcactgcacttcggcctggacaacacagtgagactctctctcaaaaaaaataaataaataaggccgggcatggtggctcacacttgtaatcccagcattgtcggaggctgcagtgggtggatcagctgaggtgaggagttccagaccagcctgaccaacatagagaaaccgcacctctactaaaaatacaaaatatcctccggcgtggtgctgcatgcttataatcccagccacttgggaggctgaggcaggagaatcgcttaatcccaggaggcggagtttgaagtgagccaagatcgcgccattgcacttcagcttgggcaacaaaaacaaagctccatcttaaaaaaataataataataatcataaaataaagataaaaattgttcggccggggacagtggctcttgcctgcaatcccagcactatgggacgccgaggcgggtgcgtcacctgaggtcaggactttgggactagcctggccaacgtggcgaaacgctgtgtctactaaaaaaattacaaaaattagctgggtgtggtggtgcacacctgtagtcccagctactcgggagtctgaggcaggtgaattgcttgaacccgggaagcataggtgcagtgagccaagagcgcgccactgcactccagactgggtgacagggcgagactccgtctcaaaaaaaaaaaaaaaaaaaaagatgaaataaaaataaaaatagaaaatagccaactacaattactcaatagcaacagagggtaaaatacaggctcagagaaattaatgctttttgcctggtcacataggcagcaaatgacagagatgggacttcacctctgggcaactgcattctgccatccttcccgtagaactctgaggaaccgagagtcttgcatcttggaggatgttccaaccaattttttttttttttttttg[131 bp omitted]ccaccacgtctggctaatttattgtattttttagtagagacggggtttccccgtgttagccaggatggtcttgatctgctgaccttgtgatctgcccacctcggcctcccaaagtgctgggataacaggcatgagccactgcgcccggcccaatttttttttgtttgttttgttttgttgtttttttttttttttttgaaacagagtctcactctgtctggccaggctggagtacagtggcacaatcccggctcactgtaacgcctgtctcctggtttcaagcgattctcctgcctcagccttctgagtaactggaattaaaagcacctgccaccgtgcccagctaatttttgtatttttagtagagatgcggtttcacgacattggccagactgttctcaaactcccaacctccagtgatactcctgccctggcctcccagagtgctgggattataggcctgagacaccacgcctggccccaaacaaattgctttaagacgaggtctccctatgtttccccactgcacttgaactcctgggctcaagccatcctcctgctgtggctcctgagtagctgggactacagactcaagccaccatgcctggccacattccacaatttagagaaagtccacaacctggaatcctagggagaccctgattcacctcaaaactgccactaaggaggtaaaacgctgcccctctgaggcaggcttcagtttccctgtgtgtgaaattgacctggcgctgggagaggctggtggaggcgcggattttgcagtttccctacaacattctggaagcctgtggttctgggaaaggttggcgtggagaagactgggaaacaaccagtggtcaccagagctgtagcaactcttccacctcggagctctggggctgggaaccccaggcttcggggaccactgtggaggacgcaggtggccccctctttcctgacatctcaggagagggaggggtaaccggctaggggaagaaaagcacaggaaggttatacagccagatggggaaggggccaaatccctgaacaaccccctcccagagttcctcttcaagtgcagggtacccaagagtcaaggccccgccccctttccagaggccccttttctacttaggtgatggctcctggctgggatgggaggcagatggacggaggggaggggggaggaggggaagggagaggcagtggatgaaggagaatggaagagatgacatccccctcggccccttcatcccattcaagtccccaagccgctccccccccacacctgcactgccagtgccaacgtcagagggaggaagacggagctcggcttaggaggctgaggccctgccccctgggccacaccaatcatgtggccttccttctccccacagaaggccagaccatggacacctcctgagctggatgtcgtcccccatcttcactctcttttctttttctttctttccttctttctttctttctttttttttttttttgagatggagtctcgctccgtcatgcaggctggagtgcagtggtgtgatctcggctcactgcaagctccccctcccaggttcactccattctcctgccacagcctcccaagtagcttggactgcaagcgcccaccac[131 bp omitted]caccgcgccccgccgtccaccctgttttctaccagagttctgatactgtgactttgtataaaatggtttggaagctggacccaccctgtgtgtgtgtggttgccctgagcccacagaaagacaccgccagagtgcggattgagaagcctttattgtgggaggatcggggtgtctgagggccccgggagtcgggatggacttggaaggctggggggaggggcctttgaggaagaggaggcctggaagcgggggtcatcacaggtcaaggggtggtccttgggacccccgcagtcagtggtgctgcggcggcagagtgcacattgacagctgagagccacggcgtaggagaccacggggttcacgccgcgcgggcagccagggagccggatggactcgaagcgcacatcgcggtagttgcacaccacctgaggcagggccggcaggaccccctgcagcacgcgggtctggaagccgtgtgagtgggagaatgagcatgtgcctggggccagcgcctcagctgagctccccagctgcccccacaggtctcagactcaggggtccaggaagccctctgttcctgccctcccacaccccattccgcagcccctgaccagagaggcagaccacccttcctcccccgctgcctctgtgggtctggccctgaggtggcagcacctgcccgggccccgggcagctcaccatggtggggcagtagccggcacagatggtggtgttgacggtgatgcacacggggcagccctccttctccacagccagggtggcattgatggggcggcaccgtggccgaagcatctccctggatgcccatgtcccgcccatgctcagcagcagcaacagcagcagcccctgggacaaggacactgcttcacccgggcctgagaccacagccctgagccctggccttcccatcccccagggtacaccacccacaaagacccagagacccttcccggcatctcctattcaggacccaccacccggacacctgcctttcagagcccaccccacagcccgagggacctgagatgccccaacatttcagatccccaccctcaggaactgccccacgtgaagcttattgggggtcacgctcctccagaaagaggcgtccttccacagctcacactggtctgccccttctcatgccagtgatggcctggaaggaggtggaaggtgcccaggggccctgcagtcttacctggaacatctccatccttggtgcgtcccctgcctggtgtacctggctttatacctcgggtttgtgggggcgtcaaggccaccaggaggttgtaggatgctggagtgagctggacactaacccttcggggggcgagaagtagacaaggccagggaggcacaggagtggctcagcggagcaccccagtcctctcccctcagtggtctagcgccaaggatgaggcggagaccacggtgaagtgacctctgagactcagtcgtcgagtgctagggactagtcgaggctggaggcacagagagtagggtgtaggaaggcctgcctctgcctatggtggggtcttgggaaccaggaggaggccgtgacccgagaaaggtgctggactgaagcctcaaccctcctctacttgagccattcctgcaccacagtccaacctaacaggaggggcgcggcttcggacttagcttctgcccagtgagagagggtctccccgtgactgtgctgccagggaagccacttgacccagatgccccccaacgagggattcagcccgagccccacctctcccttaggaacctccgcccaccctaccctcaagccaggatgcccggagcggtccccggaaatgcgtgtgcttcaggtgatttaactgattattgaataggcccgcaggaggtgtgtcctgcccgcggggccgcagcctcggaggacattgtctggacttagtcccttccccgcgatccagccgcagctgagtgggcgtgtctgggctagtcctgtccccacactgcggatagacttaatgagtgcgagcccacctaggtccgacaccgcgtagtgagcggctgcccagagctctgctccgcccccacgccagggggcgtgtctggggtggggctggcccggcaggctcccactagccccggcttacagcggcctgagcgggagttctcggtgctgtaggctttcgggacgctgtgtatgcccggcaggggcttccagtgggggccaccccaagtcgcctccagcgggcggaagcggtcgagccggcggagcgggtgcggcgaggagctgtaggtttcctgagccggagacatggcccgccgtgcggcgctcgaggcggcctggaagagcagagacagggctgccgctgcgggtcgtgactccagagttggggcgtctcttctaagctccagtaggtcaggtagtccttgcgggggtatccggacggctccgtcctgtgggagcagggcgggatggtgaggatacagctggatccttggggacgagtttcagacctcgggatctaaggagtctgcacattcaaactcctgcatttccaggcgagcaccccttaggaaggacgcgaccgggcacgcgttgcctgcgttcctgggtcctcgaggtacttaacgtcctggaagctgagctttcgcatcctagggaaggaaacgggggctttcgcttccttgcgaaggagcatgtgggggctcaagtaccgaaggaggccctgccctcagatccagaatcccctcgagccgctgtgcaggcttcctgtccctaccgcggttcctggaggtgacactaaggactcctgggtgctaaaagagggaggggctggggtctgaactgtggttgttgctgctataggagtcgagactgagaccaccggtcagggaatgggagccagcccaggggctcggcgtgcaccggccatggcgggggctgtgcaggaggcggtgccgagcgagagcccggcttacttgggatagaaccgaaagtcccgcgccgaggtggtcagatagagctggcggcggttcaggacgccccggtcggatactgtgaagggtgggccagacagcgcggggttcttcgtgcaggcgattagagcctgagcaagattgggggaggaggcatacccaagacatagatttcataccccatcccaagtcctgggtcccgagttcagaatccctctccttcggcctcgacagccatgacggccacggccctcacaccccgccccagggtcagagcccttcctgccacccacgccagggaacttcagcttcctttctcatacccgaacccttcccagcctcacctccctaaatccaagccctcctgctggtcaaggaactcaaatgcaggcccccagccaccacaaaatccccctggttctgcccccggtctcaagccttcttggtgtggccactggagctgagctgcatcttgggcaacaactccaggttacctctcctaactcccaccctaccacgtctcagaatattctagtctcctccccacccacagcccgccgtctagctccgcagcagcttaggagccctgaaggcgagtttccagcccctggtccttctggcctggcgtggatgcccagcccttcctcccgctcctctaacctcccgatcccgccccagatcctttagccacgccccaaagctgtgatttccttctggccccgccccaggctcccggagctccgctggtctcgccagcgccggcttccacccagacacctgggaaggccccccgcggtggtggtccgagagttgtgaggggctggggcccgacgtatttgggggcgcgcgcgtccgggccgggagagcaagtgtactgcgccctcgtctcgctgctctggtactttgtggtcagtaggagggttcagctgcggtgtctgagctgcggaaaggcaacccagagactcatgtgaaggagcaggggactcaaatgcagtcccccgcagactccggcgctccccaaatcttaccttttctcctgaatccttgatccccacagtccgcgtggggtctgcaggctctggggctctgggctgggcgcagggcccgccatgggtcttgggcacgtaggccgagccagaggttgtctcccatctgctgaggacctcgtcgaaagcccagatgcgagaatcctgctttgcagtcggaggtagagggtccgcgaccgtggactggagagaaggcgccgcacatcagctagaaagactcaggagtccctatcaccccccaccccaaactctgacctcttccagtcggcccccagccctttcctctgcagtccctggcatccaaattccctggcgcctcctctctcagacccaggactccaggaccctcctccttcagagaggagtccaagctcccaatccccttttctcagcccccatctttctgggtccccaggccccgcagggcttcagcctagggtctgcccacctgcaccgtgggcggggggaagggtacgggtgggataatgccatgggtaacgtagctgctggtgagatgccagttgggccaggattcaggcatctcggttgcagagatgaaagaccacggggggccacagcgcacagccagggtgccactggccatggttccaccccctccctgtagccaagcaggagctggtttgttgctgttgccccaggtgacagaacccgcccaccccaatccagccaatgaaaggcctgcaggcacatggatggatggagtgattaagagacccagagacagagagacagggactccaagaggggcacagagaaacacggagtgggggatggagagtcagaaagaggcggacagaaggggatggagaagttcaggatttcagagacccagggggtgggggagacagagacacagaaagaaggacagagacctgggggtgtcagagatacagacagagacccctgcactgcccccagcacctcaggacatccatgagaaacacccccctttgctccagggtccagaacctcctggctgcttcctccctctgccaggcctgcccacctcggggtaacgatttccagatgtccccggggctccccaacccttcccgcacgtgctgaaggagtcagcgctggtgtcagctgtcctgcctgcctttgatttggttgaaaacttccacctgggtaggctgggtggggaaagagaaagggatctagagagaagtgcaccggaccatagcgaaaaagatgggctttgatgagtgaggaataaatacaacaagaaaggggagagacagggaggaagaaagagaccacgatggaaagggagctattagtactacccagaggcgacagacactggaagttagagacagagatgaaggtggcaaaaacgaccaaagtcacagatggaaaacaaggagacgtagaaactgaggcagccacgccccaccctgcccaggggcctggtctgtatagatgcggggagaagttgcctatgtcctttgctcaaagctggacctgagagagagagagagagttggtggggcgatgggtaacatgtgaagggctattgtgaaggcctgtggtctgtccctggcttcccttgtcacttcttcactataaacagcttttgatcaccgggcgcagtggctcatgcccgtaatcccagcactttgggaggccgaggcatgcggatcacttgaggtcaggagtttgagaccagcccggccaacatggcgaaaccctgtctctaccaaaaaatacaaaaagtagccgggcgtggtggcgcacacctgtaatcccaactaaggcagaagaatcacttcaacccgggaggtgaaggctgcagtgagctcagatcacaccactgcactccagcctgggtgacagagcgagactccatctcaaaaaaaaaaaaaaaaaaaaaaaaaaaaaaaaagcttttggtcaaggcctctgactgctcaacccccattatctcatcctaccagcccattctgcagacaaggaaaactgaggctactttctgcagccatgcccaggatcccacttacccctcctcccccattcaggcttctggggcctttctgttggattttgctggccctactcaacagctctcaatggacagtgaccccctgatcctagccagggggccgatgagttagtcagaaactcatgccccactcaagctggacaaaatttttttcttttttttgaaatggagtttcgctctttttgccaaggctggagtgcaatggtacagtcttggcttactgcaacctctgcctcctgagttcaagcaattctcctacctcacccttcagagtagcttggattacaggcatccgccaccacgaccagctaatttctttatataattttagtagagtcgggttttca[131 bp omitted]ctttcccaatgtagagtaaaggttgggacagggaagagggctagaaacctgacttcagctccctgccgagggctgaactctccagcatcctgatcacttctcattcaaccttgcttgtactcctctgtgatcggtagcttattacctcaaaacagaatattctaagtcaacctttgccccctcttaccaagtaagatttcccatttgaaccccatctcccagatacttaaaggccttctgtgggccacgttctcaaggtcccctggccatctgcttgcctgttctagtttctctcctcctccacccacatcgtgaaatgtcccctcccactccccagcaaggtggtgtcctctgagactgagtagtcagcaacttaacaccaagggccaccaatgatcaaatccatgagagttgatctgaggagttatgtattagggataagaaacagtaaacactcagtaaatagtggctattattattatatcatcatcattattaccctcaagttgctccaggagaactcctattcaacctccaaaaccccatgtggtttcacccatcctgcagagattgagctcaaaatcagagaattgtgattttgtgattatttgatgagttcccaaactggggtccttagatcagctgggccatccctgaggtctctcagcatccagctctgttattttcctgggcatgggtctcaggcccggccagtccggctgaggagtgtgcagacgcaggcagtgtcaattcgaatccatcgccagcccacacggccctgggcatcagcggtcaatgcccgcacataggactgcttggccttgcactcagatacccagtgcctcctgtccactccccggcagccccctccacctgcccccgggccaccttcctcagcgttatcagccttgcagcgggtttcaaagaagtactggcggaggggactgccgccagctgcaggcacctcgcccaacacctccacctcgcgcccacgcaagtccacagcggtccggcggtctgtcacccagccactgactgcatcgcacacagccagctcaccccgacgactcgctggtgcagtttcgctcaccccacgccggctgcggttggccggggcacctgctgactcccgaaaggccccagcctccagcaggaagagcagagggggcccagcaggggcacccctagacaggactactcggggggagagaaggtcccactcaggggccagaaaagggggcaatgttgagggtgggggttgggactcaattggcacactggggaggaggaaaaggaggaggatggggagggagcatgaggggagagggagcatctctcggagcacctggagacagaaagagggaggctgggattagagaagggggtaaaaacttcagtggggaaagaagttgggaaccccaggggaggcttgcctgccaggattgtggggaagcccttgttctagaagtttgggggaccctatatctagggcttgcgtaatgcgcaacttgtagattaataataaatattcaactactacaggccaggcactgtgccccacacctctaatcccagcactctgggaggctgaggcaggtggatgacttgaggtcaggagttccagagcagcctggccaacatggtgaaacctcatctctaccaaaaataccaaaattaaccgggcatagtgctgcacgcctgtaatcccagctactcagtaggctgaggcaggagaatcacttgaacccaggaggccgaggttgcagtgagcagagagtgcaccactcccctgccacctgggcgacaagagtgagactctgtctcaaaagtaaaaataaggccaggcatggtggctcacacctgtaatcccggcactttgggaggccgagatgggcggctcacctgaggtgaggagttccagaccagcttggtcaacatggtgaaaccccttctctactaaaaatacagaattacccgggtgtggtggcgcatgtctgtaatcccagttacttgggaggctgaggcagggcaatcacttgaacccaggaggtggaggttgtggtgggctgagattgaaccattgcactccagcctgggcaacaagagcgaaactccgtcttaaaaaacaataataataataaaataaaaataaaaataattcaactactattacttaacagtaacagatgttgaaatacaggctcagagaagttaatgatttgtgcccggtcacacagccagcaaatggcagagatgggacttcacctctgggcaactgcactctgccgtccttcctgtgcaactctgaggaaccgacagtcttgcatcttggaggatgttccaaacaattttttttttttgagacagaatctcactctgttggccaggctggagtacagtggcacaatcctggctcactgcaatgtctgcctcctgggttcaagtgattctcctgcctcagccttctgagtaggtgggattacaagcacctgccactgtgcccagctaatttttgtatttttaatagagatggggtttcaccatgttggccagactggtcttgaactcccaacctcaagcaatagtcgtgtcctggcctcccaaagtgctgggattacaagcataagccaccatgcctggtcccaaacaaaatttttttttttttttttttgagatggaatctccctctgtcgcccaggctggagtgcagtggcacgatcttggctcactgcaagctccgcctcccaagttcatggcattctcctgcctcagcctcctgagtagctgggactacagactcaagccaccacgcctggccacattccacaatttagagaaaggtcacaacctggaatcctagggagaccccagttcacctcaaaactgccactaaggaggtaaaacgctgcccctctgaggcaggcttcagtttccctgtgtgtgaaattgacctggcgctgggagaggctggtggaggcgcggattttgcagtttccctacaacattctggaagcctgtggttctgggaaagggtggcgtggagaagactgggaaacagtcagtagttaccagacctgtcagcacctcctccgcctcggagctctggggctgggagtccccaggcttcggggggcccctgtggaggacacaggtggccccctccttcctgacatctcaggagagggagggggcaaccacctaggggaagaaaagaatagacaggttatagaggcaggtggggaaggggccaaatccctgaacaaccccttcccagagttcctcttcaagtgcagggtacccaagagtcaaggccccgccccctttccagaggccccttttctacccaggtgatggctcctggctgggatgggaagcagatggagggaggggaagggagaataggggaagggagaggcagtggatgaaggaggctggaagagattacatccccctcggcccattcatctcccagatggggcggaactggcctggacacccgggtccctgagggcccacactcaagaagccctggttccccaagctgcttcctggaatgttccctcctcacaggacaggccagggcccgcccaagacttctgcacatacctggagtggctgcctgccctggctcctcggtacaggaaaggggaagggtggagagtgaaaggagcccaggctgacccaaccaggaccgccttctccctcagaccgagtagtgcagaccccagggcctccaccttcagacccaggagttcagatccccagcgccctcctccctcagacccaggagtagtccaggcccccagcgccctcctctctcagacccagaagtccaggcccccagcacccttctccctcagacccaggaggagtccaggcccaggcccccagcacccttctccctcagaccctggagtccaggtccccagcgccctcctccttcagacccaggagtccatgcccccagcgcccttctccctcagacccaggaatccaggcccccagtgccctcctctctcagacccaggagttctggaattcaggcccctccttctcggatactaagaaatgcagactccgggttcctcatcctccagatttgggttgggggttccggactccgagacccctcaggggaaaccggctgcatatctgggacacttccctcttgcctcagtttcctccgccaagccccgccccggtcggccccgcccccgtccctccccacccgagggcagggcgaccaggacgccggaatcccgagggaggaggagtggagatcttacctggggcgccctcttcggctcccgcggctgccctccgcccggcagcagctcctcctcctgctcgctggctgcagggacgctcgctggcccgccgggtgctagctgctcacgctccgcagggcccgggtcgggggcgggggcggggcggcgccgggcggcagaggaggggccgggggatcctgccttgcactcgcgtgccgggaccttggaagccaggcctggctcgttcaacgcggccgccttggtcacaggagtcccagtttccagctgcctcctcctttggacctagcagtccaggcccccagcccctcctcccttcagacccaggagtccaggcatccggcccctcctccctcagacccaggacttgcgaccccagccacctctccccccagccccaggcgcctgagtactaagcccacagttccccccaccacctcccaaccccgccccgtctcagactcaggagtccagcccccagcctcctcctccattagccccaggagtctgggcctgagattcctttgccgtcttttgccaattgcgtgtcaatcccggggcagattcccaccctctgctctcctccccacttcccaggagctccacgccagacattaaccagctgggcttgggcagtgataaggccccaggcccggggagacagtggatgtgggggctcccgcatactcctctcccctggaatttcctggctggggaccggggagaaggtcttgtcctgagctcagataagagacgtgcaaggtatcataggaccagagatagacagatgtgtcttaagaacaatcagctaccttgagaaatggtgcgcggtgacatgaagggagagatagggagaagacatggaaaagtggggagagaccaaaagaaagagggggaccgagactagagagagtgggggagggcaggagcccagagagaagacagaggcccagagagcgtgagggcagacccccccacccccccgagaaggggacagagcccctgagagaccctgagaaagacagggatgggaccggagccggagtgtctcaggacagtcatgagggcagcggggctcctcaccccaccacacctctaccctgagactccgctcccctccgcctgcgctattttcagaaggaaaactgacacctgcctcgagggtcatcccacaccccctcagcctaaatatagcatggcaaggtggcaggagggtgtccccggttagggtgtttcctgctcctcaccatcccagccaaggcaacacacaaggccgctccagttatttattgggggtggggggaagggccacttcccaggctttgggtgtgcattcaggtcacctctccggcttctccacccttcccctgttcctaaacagccaatacatcctgccgcatagcaggaggactctagcttctagcttctagcttctagtcctggaggggatagtagggatgaggtttccaaacagagtgactgggaaacagtctctgtccccctatctccaggtctctgttcccctccctctggatttctgtctccctccaactctgggtctgtccttctctctctgagtctctgtccccctctctctctgggtctctgtccctctctctctgggtctctgtccccctctctctctgggtctctgtccccttctgtctgtgggtctctgtccctctctctctgggtctctgtccccctctctctctgggtctctgtccccttcactctctgggtctctgtctctctctctgtctctggatctctgtcccccctctctctgggtctctgttcccccccaggtctctgtccccccttctctctgggtctctgtccccctctttctaggtcccagttttcttctctctggatatctgtccaccctctctgggtcccagtctccttcttgctgagcctcttgcatcctctctcttggggtcactgtctgcttctctttcccctcgtgggggtctctgttcccgctcccggccatctgccctcttcccccttgcccttggatttctctcttttgctctgtgcctctcctccctcctggcctcagttcctgtctgtgtctcctctttaggtctctgtgctggagtccaacctgtctcttgtcactgtgaggtccgtctccattctgtccctaaatctggctttctctccatttcagagagaagtgactacctaaagcttctattaatttcaaccattatcaaactcctctcaccatctgtaccttctctttagctgtatgaaaaggtgctcagatgaaaccaggggtttccacactgaattcctgagctgcattttgagttgccaagaggaggcgtgttctcctccaaccagttcccttcccatgcttcccactggtgtctctaaggaagatttatttgacccaaaaaaggggtgggtatggctaaaaataacaacaacagtctgtaaaccactggataggttttaataaattaacccaagtaaagtactttgataccaaaggaagccctatatgtgttagtgatttcagccttcttcctctaaatgccctttgagttctgaaagatttctgaaaatgttcggccttgtgaccttgggtaacacctgctgctctgagcctcagtttccccgtctgtaagaaatgaggctacgggactcaggaggacccgtgtgtcccagcaggctgatggggacatgtgaagcagacagacagcctgcctggcccctggggacaagctgtgagaccttgggaagccactcccctgctctgagactcaggtttctcccctggaaaacagagtgaggcccccagcctgtctgacagccttcctgagctgcagggagggtaggtgacaggcctggttcaggattgttctgtgattctatggaatagactgtacatcactcttgggttcaggggcaccaactttttctggctttttcttttcttttctttttttttttgagacagagtgttgctctgctgcccaggctggagtgcagtggcgcaatctcggctcactgcaagctccgcctcccaggttcatgccattctcctgcctc[135 bp omitted]ggcctcccaaagtgctggggttacaggcatgagccaccgcgcccggccttttctgcctttttctattgtggttctctttccctgagactctgttgttctgtctccaactctgggtgtctgacgctgccctctgggtctctgtccctccctcccccactggctctttttgtttgtttgttgagacgggggctccctctgttgcccaggctggagtgcagtggtgcaatcatggctcaatgcagcctctacctctcagggtcaagggatctttctgcctcagcttcctgagtagctgggatcacaggcatgtgccaccacactcagctaatttttgtattttttgtagagatggggtctcaccatgttgcccaggctggtcttgaactcctggcctcaatcaatcccccttcctcggtctcccagagtgctgagattacaggcatgggccacttcgcccggcttctatcccctgctcttggtctctgtctccccactctggatttctgttcctctcttctgcgtctctgccataccccaccctccaggtcattgtctccctctccctgagtctctgtttctctccctttgggtctctgtctctctgggtttccacctcttcctttttctgggtctctttctctatccttttggctctgtccctctatcatgtctggacagagtacagttttctccccctctcccctttcccttgtggctctgacctccatgtctgagcataaaactgtaggggagaatgggagtgaacagcacaatgaagtggatgtggggtaaacaggaggagcatccacctcttcctaatttacccagtcgcctctggatgaacacccaatcccatggatacagaatccagtcccgccccctacagcgagctggggagccagctcggcacacctcccagagccctcgccactgcatgctcccagatacatgatgcttccccactgctatttcctttgggtcctggtgctaccactaaatgcaaaacagcccgatgtggccctatggaactcgttcgcacagtccaactcaacccaacttcctgtaggactcacatagtgacacaactcaatggaactcaattcagcatggccctatgagactcaaacagtggcatgacccaactgaactggccttacaaggctcatatggttgtacaattcaacacaactcaactcgctgtggccacgaaaaatgtccagccacacacctctacacagttaagcccaacagaaccctacaagattcatttggtcatacaaacttaacccaatgtgacctagaaagctcaaattctaccactggactcttcacatttctacatgactcgcaagttcacagaacctaaaataacatgcccctggaagaatcacagagctacacaatttccaccatgtctcaacgaaacttaacaccacacacattcgatctcaacaatgccatgggggaccatctaacttgacccaacatggccctaggggacccaccaaaccacagaatcctacacaatgcagctggaccacactatcccagactcacaacccaaccaaacccaacactgacctaggaaactcacaaaatgatacgaccaaacctatctcaacactaccccaaaaggctccatgagctttgcacaactcagagtaatatgaaccaattgagtcttcattaacacaacacaacccattgccattcgctgctgcttcaggaggtacccacaggagctaccaaaccacacaacccaagacccaacaagactcagtgtttccccactcgttacgacttaacctagctcttcctaaacccaatcccctccccccagccttgccctccaccctgccctccctccctccctctagggaggtgtgaggtcctgcagacctcaactgttcctcacacttcggtgaccaggtgtttccctgggggtgcccagagtggaggtggtagctcaggtacctccccgtccaccagccccccattggccttgccctccagtgggccacaaggctgcatgtccacatggctgaacatcccagcctcttcgccctctgtctcccggtgataaaagtagctgaaattggagacaatgacgggcactggcagggaaatagtcagcacgcccgcaatggcacacagagagcccactatcttgccacccacagtgacgggtgccatgtctccatagccaactgtagtcatggtgactaccgcccaccagaaggactcagggatgctagtgaaatgggagtccacccggtcaacttcggcaaagtagacggcgctggaaaagaggaccacaccgatgaagaggaaaaagatgaggaggcccagctcacgcatggaggcccgaagcgtctggcccaagatttgcaggccctttgagtgccgggacagcttgaagatgcggaagacacgcaccaatcggatgactctcaggatggccagtgacatggcctgctggcccacccctcgctgccgggccagctcggtgcccagtgccacaaagtagggaaggatagccacaaaatcgatgaggttcatcacgttcttgaagaagatagccttgcttggacagaccaggaggcgtaccagcagctcaaaggagaaccaacaaatacacagcgtctccaccacgaagaacgggtcattgaagggcaggcggggtggatttccaggcatttggctggagccattcagcggagcggggaactgcagggaggaaagtgttcagggagggtcaggctggggctaggacacggggacagccttaatcatcatttaaatacccagctcctctttacacattggtcagtagccgctgcgccaaggccctccgtgacctggttatcccagacttcctcccaggatcccagggatcatccctgggccgctgactttctggttgcctgacctggtgggtggctggagacgtggtccctgccccttcatgcgtgggaactcatgtttgagtagggtgcaacctcttctctctcaaagtcccgcctccagtgttgattttctagatggggagcatccctgccctggccccaccaccttgtgcctagcttttccttgccctccacagtcccagcccagagtataatgcggctgggcgcggtggctcacgtctgtaatcccagcactttgggaagccgaggcgggcggatcacgaggtcaggaaatagagaccatcctggccaacacggtgaaaccccatctctactaaaaatacaaaaattagccgggcgtggtggcctgcacctgtaatcccagctacttgggaggctaaggcaggagaatcgcttgaacccgggaggcagaccttgcagtgagccgagatagcgccattgcactccagcctgggcgacagagcaagactctgtctcacaggaaataaaaaaaaaaagaccttctctgcaagccgagccctaggccccctcctctggcccctcaacctggctttctttccatagattcctcctactgtcgcccctcgggctccagcaccctcagctggagttattcagggcctggctttcaccacccagccgcacagactccggagttttcaggctctccttggcccccctcagctgtgatttttaaggttcctgtcctcctaccccttgcatcaagggccctgccctcttcacgccgggtttctcactgacctcaaccccaccttctgatggggcaggtcctccgacccggatcctcaggccccgcctcccgcccaccctgtcttcggctggcccacccctcgcagcccctggccccgccttatgattggccaggtcccctctggaccccgcccatctcctcccaaaccccgcccgtctccacccacgccccgcctctcaccgggccggctgcggctgcagcagcaagccccgtgccgtcgcggtcgtcgcggaagtcaggcagcgtctcgaggcagaagacgacgatggagacgaggatgaccagcacggagactacggcgagcacgcgcgcggcctgagagctctcgggaaactcgaaaagcagccacagctggcgggcgaaggcgcggcggggcagggggcgctcgggcggcaccgggcagccctcgtcctcgcgcaggcgtgccagggccgccgcgcccagcccgtagaaggccacctcttccaggaagacgtcgagcggcacgtgcgccggccgccgcagccgcccaccggactggtagtagtagagcacggcgtcgaagctgggccggtgccggtcgaagaaatactcgcggcgcgcgtcgtcgtagaagcggccgcggcgcgctgggtcccctagcagagtgtccgggaagcggcccagcgtgcgcgcccgcgtctcgaagcgcagcccggccacgttgagcaccagccgctcgcagcagccgcacggcggcgggcaccgcggctccatggcgcgcgcagccccggcgacccgcgaaccgacgtgtggccccgacgcccggccccggtgcggccccgcctcggccgcctcggccgccgccgccgccgccccagcccggtgtccggtgtccggtgtccgcgcgtaaaaatagcccggcagggcggctagggcgcgagggagggggcactgtgaccccggcggggcggagggcgacagggcgaccgcgcgccctctgccgggacgcccgccctgccctgccccgccgccgccgccgcccgcgcctgctctgcgcctttcccgtcccggggtcccctttctctccgtccttctgccgccgggatcctgtcctgcgtctctccaagtttccgtgtgcgtgtgtttcgtcagaatcaggcttcagttgcagtcgcctcttttcttttctctttcttctttctttctgtctttttttttttttttttttttgagacacagtttccctctgtcgcccgggctggagtgcagtggcgcgatctcggctcactgcaacaacctccacctcccgggatcaagcgattctcgtgcctcagcctccctagtagctggaattacaggcgccaccaagcccagctaattttttttcttttttcttttttagttgagaaggggtttcaccatgttggccaggcaggtctggtactcccgacctcaagtgatctgccctccttggcctcccgaattgctggggttacaagcgtgagccacggcgcccggcctggagtcgccctgtttgcacctttgtctctcactctcttgtgtgtctgtgtccggctgtcccctctgggtctctgtctcttttgggatgtatctctgagtatctctatgggtcatttatttctgagattcgtcgttctgggggcctctgtatgggtccctctgccagcctctacgtctcggtctccgcctttattttgactcttggtctgtctccgtttatctcttgtctctcttggtctctttgtctctcctctctaggtctctttttgctcattatctcttagccctccatgtctctgtctcagggttcctcggccgctcccctttgggtctccccttggggtctctagaggacttagggtctccggagtcatatctcttgatctctccctgaccatcactccatgtgggtgctgccacagtcccggtggctgtcccatcctagggtcactctggcagctgcaaaccactgagcatgtgcacacacgccccattctctccccagagttcgctccagagtctccacctggattcttcgcaagactttctgagacctagcaggacctgagctgcggctatgactctggcaaaaggagtctggtcttgccggaacgggcgggggttgggggtgtgggccggggagatgccacagggtcattttcaggaactgaagggcgcagagacaagacggtggccttctagccactggtgtccggtgacactgcataaaaatagctccatcagatgggcttgggggaagtggaggggtttgatcactgagactcccaggaaagaagtcctggtcgccctctgctgggggtgtggagagaggtaggtactaagggttcgaacgccctgctaatcctggcactctttctcttcctgtcttccttccttccattccttctctcttcttttcttctttctttctttctttttttttttttcttgagaggagtttccctcttgttgtccaggctagagtgtggggacgtgatctcagctcactgcaacctccgcctgccagtttcaagcgattctcctgcctcagtctcctgagtagctgggactccaggcacccgtcaccacacccacctaatttttgtatttttagtagagacagggtttcaccatgttggccaggctggtctcgaactcctgacctcgtgaccgcctgccttggcctcccaaagttctgggattacagacgtgagccactgcacccggccttttctttctttttctttttcttgagacggagtcttgcagtcgcccaggctagagtgcagtgttgcgatcttggctcactgcaacctccgcctcctgaattcaagcaattctcctgccttagcctctggagtagctgggattacaggcgcccaccacacgcggctaattgtttgtgggcggcaagccacccaggtgccgaggcaagagaccgagggcacgagctgttccagtataataaaatatataaaataagaatagttatagtagatatagatcatagatatgattatatatgaatatcattaatcattagtttgtagcaattactctttattccaatattataataatcctcgctctacaatcataacctaggaaaaaccaggccatacagagataggagctgaggggacatagcgagaagtgaccagaagacaagagtgcgagccttctgttatgcctggacagggccaccagagggctccttggtctagcggtaacaccagcgtctgggaacacgcccgttgccaagtggaccatggtctagtggtagcctcagtgccaaggaaaaccacccgctacttagcagaccaggaaagggagtctctctttccctgggggagtttagagaagactctacccctccacctcttgtggagggcctgacatcagtcaggctcacccgcagttacccagaggcctaaccatctccctgtgatgctgtgcttcagctcctagtccgctttcatgttccatcctgtacacctggctctgccttctagatagcagtagcaaattagtgaaagtactaaaagtctctgatatgcagaaataatggcgtaagctgtctctctttctcctctctctctgcctcggctgccaggcagggaagggctccctgtccagtggatacgtgacccaggggaccttacctatccttggagatgtctcacactcctcaccctgcctctttgtcttatatccaataaatatcagcacagccaggcattcggggccactaccggtctctgtgtcttggtggtggtggttccccgggcccagctgtcttttcttttatctctttgtcttgtgtctttatttccacaatctctcgtctctgcaaacggagaaaaacccaccgaccctgtggggctggaccctacaattgttgtatttttagtagagacaaggt[136 bp omitted]ctttctttctttattttttgagacagggtctcagtctgttgcccaggctggagtctagtggcacaatcttggctcactgcagcctcgactttctgggctcaaacgatcctcccacttcttttttttttttttttttttgagacggagtttcgctcttgtcacccaggctggagtgcaatggtgcaatctcggtttaccacagcctccgcctcccaggttcaagtgattctcctgcctcagcctctcaagtagctgggattgcaggcatgtgtcaccatgcccagctaattttgtatttttagtagagactaaaatacatgttctccatgttgatcagtctggtctcgaactcctgacctcaggtgatacgcccaccttggcctcccaaagtgctgagattacaggcatgagccaccccacctggcccctcccacctcttctaagtaactgggactataggcgtgagccaccatgcatggctattttttgtaatttttgtagagacagggtcttgctatgttgcccacgctgctcttctactcctgagcccaagcaatccaccgtactaggcctctccaagtgctaggattacaggtgtaagccactgcacccaccctgtctgggattctatgtcccctggacttctatgtccctctctctaggtctctatcttccctctgtctgggtctgtgtccatttatttcacggtctttggccttctctatctctctctgtccaccatctttctggtctctgtctcctattttctcccattctcgtttttttttttttttttttttttttttttgagtcacagtctcgctcttgttgcccaggctggagtgcagtggcacgatctcagctcactgcaagctccacctcccaggttcatgccattctcctgccac[222 bp omitted]gctctgtcgcccaggctggagtgcagtggtgtgatctcggctcactgcaacctccacctcctgggttcaagtgattctcctgcctcagcctcctgagtagctgggattacaggtgtgcgcaaccacaccaggctaatttttgtatttttagtagagatggggtttcaccatgttggccaggctggtctcgaacttctgacctcatgatccgcccacctcggcctcccaaagtgctgggatcacaagcgtgagccaccacacccaacctaatttttgtatttttagtagagatgaggtttcaccatgttggctaggctggtctcgaactcctgaccttaagtgatccacttgacttggcctcccaaagtgctgagattataggcgtgcaccaccgcacccagccaaggtgccatttttttgctcaggaagttagaacaaaacttaaaaggtgggtcaggcacagtggctcactcctataatcccatcactttgggaggccgaggtggctggattgcctgaggtcaggagttcaagacaaacctagtaaacatggtgaaaccccatttctactaaaaatacaaaaataagctgggccgggtggctcgcgcctgtaatcccagctactctggaggctgaggtaggagaatcacttgaacctgggaggtggaggttgcagtgacctgagatggcaccactgcactccagcctgggcaacagagtgagactctgtctcaaaaacaaaacaaaacaaaaagccaggtgtggtcatgcacatcagtaatccagctacttgggaggctgaggtggaagggtcatttgagccaaggaagtcaaagctgcagtgagctatgatcacaccactgcactccagcctgggtgacaaagcaagaccctgtctcaaaaaaataaaagataaaaaattaaggctgatgagttagggatattatcttggatcatttgggtaggcccactaatcataagggtctttaaaagagggacgtggctgggtgcagtggctcactcctgtaatcccagcactttgggagcctgaggcaggtggatcacctgaggccaggagttcaagaccagaccggccaacatggcaaaaccccatccctactaaaaataacaaaaattagctggacatggtggtgggcgcctgtaatcccagcgactggggaggctgaggcaggagaatcacttgaacccagaaggtggaggctgcagtgcactgagattgagccaccgcactccagcctgggcaacagagtgagactctgtctcacaaataaaaaatcaaaaaaaaagagggatgcaggaaggtctgattcatggaagatgtgaggatggacatagaggtcagagaagagaggatgccatggtgctggctttgaagtttgaagacggaggaacggccatgagccaaggaatgggggcggcttcccgaagcttgaaaaggcaaggaaacagactctcccctagagcctccagaggaaacagagccctgttttcgacgtctaacctctagaattgcattctaataaacttgtgttgttttaagccactaagttcgtggtaagttgttgtagcggcaacaagaaaataatacagtcagactctccaattcctcagagtcattctctgaggttatggta[138 bp omitted]gcctc[225 bp omitted]aggctggagtgcagtggtgcgatctcggttcactgcaacctccgcctcctgggttcaagcaagtcttctgcttcagcctcctgagtagttgagattacaggtgtgcgccaccatgcccggctaattttctttaaaatttttggtagagataaggtctcactatgttgtccaggccgatcttaaattcctgggctcaaacaatcctctggcctcagcctcccaaagcgctaggattacatgtgtgagccactggccctgctctgccttttttttttttttttttttttttttttgagatggagtctcactctgtcacccagtctggagtgcagtggcccaatcttggctcactgcaacttccacctccacagacgcgtgccaccacgcccggctaaaattttttttgtattttaagtagagatggggtttcactgtgttatccaggctggtctcaatttcctgaccttgtgatccacctggcttggcctcccaaagttctgggattacaggcatgagccaccgtgcccgggctaatttttggtctcaatatgttggccaggctggtctcgaactcctgacctgaggtaatcctcccacatcagccttccaaagcgctgggattacaagtgcgagctattgtgttgggcctgttttgtttcattttcactttgaactatttgtagccttacagaagagttgcaaagattgtacagacatttaaaaaatatccatcacccaggttccccaaatgttagaatgttgcattgctttggcaacgtttgttaaagctcagacattggccggagcagtgcctcgcgcctgtagtcctagcactttgggaggctagaggggacggatcacctgaggtcaggagtttgagaccagcctggccaacatggtgaaaccccgactctactaaaagtacaaaaattagctgggcgtggtggcgggtgcctgtagtcccagctactcgggaggctgaggcaggagaatggcttgaacccgggaggtggaagttgcagtgagccaagatcgcaccactgcactccagcctgggtgagagagccagactctgtctcaaaaccaagacattgaggtggcacaatacttttgacaaaatgaaagagttcattcaggttttctatatttccactaatgtctttttcccacgccaggctgcagtcggggttactatgttgcatttggttgtcatacctccttagtcttctgcaatctgtgatagtttgttactttttccttgtctttcatgatctggaaactagaagaatactagtcagttgttttgtagactgtctctcaatttgtgttcctctgatctgttatcttgcttggattgaggttatactttttgttgggtgggggtagagagaatgccacagagaggcattgctcttctcattatatcatactggggggtgtatgatgtccatatgccatatcactggtgatgttaacattttttttcttgagacaaggtctcactctgttgcccaggctggagtgcagtgttgtaatcatagttcactgcagccttgacctcccaggctcaaacagatcctcccacttcagcctctcaagtagctgggactacagacctgagccaccacacccgaataatttaaatctatctttctttctctttcttttcttctatttctttttgttgttgttgttgtttttgacgtagtttggctcttgttgcccaggctggagtacaatggcgcgatcttggcgattctcctgcctcagcctcctgagcagctgggattacaggtgtgtgccaccacacctggctgatttttgtatttttagtagagatagggtttcactgtgttggccaggctggtcttgaactcctgatctcaggtgatccacccacctcggccttccaaagtgctgggattacaggcg[146 bp omitted]agtgaagccccgtctctactaaaaatacaaaaaattagccgagtgtggtggcaggcgcctgtagtcccagctacccaggaggctgtggcaggagaatgacatgaacctgggaggcggagcttgcagtgaatcgagattgcgccactgcactccagcctgggtggcagagcaagactctgtcttaaataaataaataaataaagagaggcagccaggctctgtggcacatgcctgtagtcccagctacttggaggctgaggcagaaggattgtttgagcccaggaagttctgggctgtagtgtgttatgctgattaggtgtccatactaagtttggcttcaatatggtaacctcccatgcgtgggagactaccaggttgcctagcaggggttgaactgacctaggctggaaatggatcaggtcaaaactcccatgttgatcaggagtgggatcatgcctatgaatagccactgcacatgagcctgagtgacacagtgagaccctgtctctgaaaaatcaatcaataaataggaagcacagcataaaagtttagaaaagtcacaacctggcaatgtggtagagaagggaagagcattttttaggagagaaatagaagcaggctgtattgccttgctggagaggttgcgtgactaaaaggaagccaagtgctaacatccaagacaatgggaaaaaggccttgaaggcatttcaggagtcttcaaaacagcctcccccatcacaggctctgaggcatataaggaaagagtggtttactgggccagatccagggccctgtctcctgctcagcctggggacactgctcccctgcatccctgctgttcgatcaccagccatgacacacagggtcccaagtacagcttgggccaccactccagagggtgcaagccataaactttggcagctttcatgtgggattaagcctgcaggtgcacagaatgcaagagtgaaggaagcttagcagctcccacctggatttcagaggatgtgtaggaaagcctgggtgtccaggcagaagtcggctgcatggttggagtccctacagagagcctctactaggacagtgccaagggggaaaggtggggttggaggcctaacatagagtccccaccagggcgctgcctagtggagctgtgagaaggggacccctcctctctagatcccagagtgacaggtctgccagcagattgcaccctgagcctacaacagctgcaggcactaaactccaacctgtgtgaggagacattggggctggactttgctgcccaagactttgggagcccactccttgcaccagtgtgccttggatgcagaacatggaatcagggattattttggagctttaaagtttttttttgtttttgtttttgttttgagacagagtctttctctgttgctcaggctggagtgtagtggtgcaatcttggctcacgacaaccttcgcctcccgagttcaagcaattcttctgtctcagcctcctgagtagctgggattacaggcacctgccaccacacctggctaatttttgtatttttagtagagatgaggtttcaccatcttggccaggctggtcttgaactcctgacctcgtgatccatccacctcggcctcccaaagtgctgagatgacaggtgtgagccactgtgccaggctagagctttaaagtttaatgtcttctctgctgtgtttcagacttctgttaagcctattgtccctttcctttggcagatttctcccttttattttattattattattattttatttttattgttgttgttttgagacaaagtctcgctctgttgccacgctggagtatagtggcacgatcctggctcaccgcaacctctgcttcctgggttcaagcaattctcctgcctcagcctcccaagtagctgggacaacaggcacgtgccaccatacccagctaatttttgtatttttagtagagacagggtttcaccatgttggccaggatggtctcgatctcttgacctcatgatctgcctgcctcagcctcccaaagtgccaggattacaggtgtgagccaccgtgcccagccatcattattattttttgagatagagtcttgctctgtccaggctggagtgcagttgcacagtctcagctcactgcaacctccacctcccagattcaagcgattctcctgccttagccttcaaagtagctgggattacaggtgcatgccaccatgtccagctaatttttgtatttttagtagagaaggggtttcgccatgttgcccaggctggtcttgaactcctgatctcagggatcctcctaccttggcctcccaaagtgctgggattacaggtgtgagccaccacacccggcctattttatttgtttttttgagacagattctcactctgttgcccaggctggagtgcagtcgtgcaatctctgcctcccgggttcaagcaattctcctgcctcagcttcccaggtagctggaattacaggtgcgtgccaccactcccagctaatttttgtatttttagtagagatgggatttca[131 bp omitted]gagacggagtctcgctctgtcgcccaggctggagtctagtggcacaatcttggctcactgcagcctcaactttctcggctcaaacgatcctcccacttcttttttttatttgagacggagttttgctcttgtctcccaggctggagtgcaatggtgccatcttggctcaccacaacctctgcctcccaggttcaagtgattctcctgcctcagcctctcaagtagctgggattataggcatgtgccaccatgcccagctaattttgtatttttagtagagacggggtttctccat[134 bp omitted]aataatttctgtagttattaaacaggctattgaatccatccacaaaacttaagatacaatacttaagaacagggctctaaataacaagtgccagctctctgatctcatggccaacaacctgagattcctgccatctggtctcagttcaggacctttgcacttactgttaaacaccgcccccccggccccaccccagatctcgcttctatctgtcctttattcaaatgttacctcttcagaggggccttccattatcaccctttctaaaacagcctcgctctcacttcccatccctttattctgctccatcgttcttcattatgctggccactatctcaaattatcttttattatttatttatttatttacttttgagacggagtcgctctgtcgcccaggctggagtgcaatggcacgacctcggctcactgcaacctccgcctcccgagttcaagcgattctcccgcctcagcctccagagtaaccgggcttacaggcgcgcacggccacgcccggctaatttttgtatttttagtagagacgggctttcaccatgttggtcaggttggtctcacactcctgacctcaggtgatctgcccgcctcagcctcccaaaagttctgggattacaggcgtgatccaccgcgcctggcctcaaattatctttattcagttaaatgcttttattgtctctcccagtacaatgtaagccctagcagcagaagactttgctttaatcacgtgctgtacccccaaagcccagacagtgcctagcacacacgagatgctcgatgaatagttattgattgaatagattagacatcaacgcaatcaggctgttcacctagggactctttgctaggcggcggagaggtacgttacagttctctacgcaaaacgcatgcgcgaaagatccgggaagtgtgatcggaaaggggcggagcatcagggagagtctcgcggacataggcggttcggcgcggaaagcgggaggtggaggggcggcttggggcaagcgcgcgcgcgcagtgcagaagccagccccccgcggctgaggtactcaaggtgcccaaaggcggggtagtgacctcgcgcgtgcgctgtgcccgcggcagcgccgggtcctagtgtgtgggttgttgttggcaccgcacggcgcgtgcgcagtgaggacggcggagggatttgcggccgggacccaccccctgctccagtcgctatcggaggccgcgcgggtggctgagcagcggcctggtgcgctcgcttagcgggcgacggaatcagacggacgtggacgcccccggagtggaagccgaagcaggagttgttgttgctgaggggctgccgcagccgccgcgagcctccggacagacgccagagcgaggagggcgctacgcggtgagtgagtgtgactgagtggcccgacggggtgcggggccgctacccagaagccccagcggtgggcccggtcctcttccccgcggccaggcccctttcccgcgtccccgccacaggtcccttctgcatccctttcccggaccccgaaatctctgggcacccacgcccgcttcccacagcgccctcgtggttccctacccacaggcccttgcggtgtgtggccttttttctttttcgtttgtctatgttgtcctggacccttacccataattcctttcgctttttgcggggtccaggtctgttacccacaagcacttggttttggggcttcgctccttatgtttctctttctttgcttggaaacttccgatccccaggaccctgcaaactgcatctcgtaatttgccctccacggcacgggacgagcagccacagctgctctgggcctccctcctcgggtccttgatttccccagaaattcccagggaacctctccgccccacagctcgtgtcagaggactctgagacttcactcttcaggaacccttttccagccgttatttttgttttctttaccggcctttcacctccacccccaccaagacgtacccttttctccgcaacacaggactgttctctgcccttacagagcctgttttaattccgagacttttctcctgtctttcttattttgagagtcaaggagtaacaggggctttctctgtgcagacccgatctaacctaaggctgtcctgcttctgctctcagacttggcaagatgacccagttcctgccgcccaaccttctggccctctttgccccccgtgaccctattccatacctgccacccctggagaaactgccacatgaaaaacaccacaatcaaccttattgtggcattgcgccgtacattcgagagtttgaggtgagttcactgagcaggccaggaatggtttgggttctggggagcaacgggttggatttgcgagtccagcttctggccattttgccagctgcgtgatttaagcgaggggcttaacctttgtgatcctcagtttctctgttttaaatggggttggagccgggtgtcgggtgtggtcgagtgcgtctgtagtctcagctactcaggaggctgaggtgggaggattgcttgagcccaggagtcggaggctggagtgctttgtgattgtgccactatactccggcctgggtgacagagcaggacttcgtctctcaaaaaaaaaattttttttttaagtggggttgtggcccggtacggtggctcacgcctgtaatcccagtactttgggagaccgaggcaggcggatcacttgaggtgaggagttgaagaccagcctggccaacatggtgaaaccacgtctctgctaaaaataacaaaaattagccggacatggtgcctgtaattccagctacttgggaggctgaggcacgggaatcacttgaacccaggaggcggaggttgcaatgagccgagatcgcgccactgcactccatcctgagcaacagaacaagactgtctcaaaaaaaaaaaaaaaaaaaaagtggggttgatagtacaccttttgtagaatttttgtgaaaattcagtgagtagtggttgaggattcatgcctaacccacaccatttatcagctctgactttgggcaaatgttgtatcctcttaatgcattggtttctttatctttagcaaggggatagtggtagcacccttataatgttggtggagaattaaatggcaaactgtatgtcagggggcttggcaccaagcagtcagcacatgtcagcctttgttactctgtttactacttttattgttaataagatgatgttcataaaggcttagcacccagtattgagtattggagggcttaaaactgcagatggggatcttagctctgcacctttgggataaataggaatgaatgacttaggctcctggacctctgtgtttttatttgtgaaatgggatgacaagggtcatctcttaggtgcatcagagcacacctgagaaaagctggcacacagtcggaagttacaagaagaacgttctagcattgggtaggtaagggcagctggaggcgagggagttgcagagcagaatttcgtagataacagaaaggtatgtcttcagtgggatttgccacccttggtgaacccgcacttgagagatattactggccaattaacttaatgggcacaggcgggtggtaggtgccctttgatgatgcaggtcatgtgccagttaccatttatttatttatgagacagttttgctctgttgcccaggctggagtgcagtggcgtgattttagccaactgcagcctccggttcaagcagttctcctgcctcagcctctcaagtagctgggattacaggcatgcaccaccacgcctggctaattttgtatttttagtagagatggggtttcaccatgtaggccaggctggtttcgaacccctaacctcaggtgatccaccccccttggcctcccagagtgctgggattacaggtgtgagccaccatgcctgggagccaggtactttttttttttttttttttttgacttggagtctcgctctgttgcctaggctggagtgcagtggcgtgatctcggctcactgcaagc[135 bp omitted]gatctcctgaccttgtgatctgcccactttggccttccaaagtgctgggattacagacgtgagccaccgcacccgaccttttttttttttttttgagatggagtatcgctctgttgcccaggctggagtgcagtggcgtgatctaggctcactgcaacttccacctcccgggttcaaaggattctcctgcctcagcctcctgagtagctgggattacaggcacgcgctaccatgcctggctaatttttgtattttttgtaaagacggggtttcaccatgttggtcaggatggtctcaaactcctgaccttgtgatctgtctgccttggcctcccaaagtgctgggattacaggcatgagccactgcaccctaccagccagttcctatttaatgtgtggttgatgagacctttaagagctgccttggccctcagagggtgtgcagttgtgggctttggagccctgttctgtcagcttatgttgctttaggcctggtcatcctcactggcactcataagcagggccctgccatcactccactcccatcacatcctctggcactttgttcaatgtgagtgatacttggagctgtgagaagcaatgtctttcctaaatatggaagacagggtgtttcctaaatactataaagctagatgtcacctgtaccagtgcttttcaaactgtctttggtgaaggacagatactgtttccaatctgtttgcttttgataaatatgatagaattactttttaaagaaagatctacagtcaggagttcaagaccagccaggccaacatggtgaaaccctgtctctactaaaaatgcaaaaactagccaacatgctgtcgtgtgcctgtaatcccaggtactcactcaggaggcttaggcaggagaaccgcttgaacgattctagtcagttgctgggttccttttagagagacgggcacaggggggaaagcagggcttagaatcgcttgaacctgggaagcggaggttgcagtgagcccagatcgcgccattgcacaccagcctgggcaacagaccacaacttcgtctcagaaaaaaaaaagacctacagaataaaagaccaaatttgtattaagagtcagtggacatcaaattgtgaaattactgtagaagttcctgaacacttagtcctggtttctgtacttatcacagtccagcaacagtttagatagtactggtccatggaccatgcttagtttttgagacaggattttttttttttttttttttttttgagacggaatcttgctctgttgtgcaggctggagtgcagtggtgcgatctcggctcactgcaacctccgcctcctgggttcatgccattctcctgcctcagcctcccgagtagctgggactacaggcgcccaccaccacgcccggctaattttttgtatttttagtagaggtggggttt[136 bp omitted]gatggtgtttcactgtgttgtcccaggctggtctgaaacccctaggctcaagcattctccctgtgtcatcatcccaaagtgctgcgattacaagtggaagccactgtgcgtggctgcagaccttgctttgatctgtgccactcccctccctccactgtgtcaggggaagtgtgcgtggatgtttatttttgtagggggtgggggtgggagggttaacctgtttatttccttggtgagtgtcccttgccatttcccccagtccttcccaccctgtcacctctcttcttgttcccaggaccctcgagatgcccctcctccaactcgtgctgaaacccgagaggagcgcatggagaggaaagtatgtcatttttgcttcctgaccccctgttttaccactgtctccagatgatccttgacactagggcacttctatctgcattcacttctccacctcccctttctcctgacagagacgggaaaagattgagcggcgacagcaagaagtggagacagagcttaaaatgtgtaagtctctcatccaccatttggctctctcctctcccaaaccctctgtattcttcccaggtcatacccaggaccctgctgtctccctaaggcctgtgttgtggggaacagggttgttagttcatttgtttagcccctgccacttcacaagcactgtttttggtttaggcttttcagcagcagaacatagggtaaaagttggcaggaagggagacccctggtaccttgggctcctcctgcatgggaggacagttaaggggctcccacaacccagctgggtgtcacaggctgaagtggtgggttgtgggatagtggtctgtcctggctctaaccttaggtccccaacccttgggctgaggatgttccatcccctccacatagaggaggaattggagtacaagacaggtgtgttgttgccattaaccaaactcataagagggtcagatgtcaacctccagtggctctttattctgaaagtgaaaactgtacagtcacaggcagcatagcagtgtttcactcagcaggggaccgtggatgtgatggtgatcctataagattatatcatattttgccaggcactgtggctcacgctgtaatcccagtactttgggaggccgaggcaggcggatcatgaggtcaggagttcgagaccagcctggccagcgtggtgaaatcctgtctctactaaaagtacaaaaattagctgggcgtggtggcgagcgtctgtaatcccagctactcgggagactgaggcaggagaatctcctgaacccagaaggcggaggttgcagtgagccgggatcgcgtcggctcactgcaacccagcctgggcaacaagcaaaaatctgtcttaaaaaaaaaaaagattataccgtctatttactgtaccctttctatgctttgataacgtttagatgcacaaatacttactattgtgttaggattgctgtagtatttggtgtagtaacacgcttggcctcggagcagtgggacgcaccctctagcccaggagtgttaggtatgctgtctaggctcgtggaagtgccatctcatgttggcatatcgacatcatcatcaaacgacgcacttctcagaacatgactctagtgagaagacaggttttcctcctatacctgtgaactttgatgaatccctttcctccaaatcctggagtgcaggatttcctcacggtgcttacgcagaagcgtgacagagacatctggcggtgcactctttggacattggctgtcggaacgctgtcttgatgtcctgcctcagaggcatctcagactcagtgtccaaaccacaggggttttccctcgccaccaacctggtttcctttgggtgttttctctgggacatagacattcagctgtgccggtcatgacctcattttttgccatgcagtttgtttctaacaccttttctaaccttttgctcagcctctcaccaagacctatttgtgttattttctaaatgtcacaaatctgacccttcttttcatgtccatcatcaccacccaggtcacctcttgcctagacaacacagtcacagtcttaactagtttacctatgtctttttgtttgtttgtttgtttgtttgttttttggaggcagcctcgctctgtcgccaggctggagtgcagtggtgcaatcttggctcactgcaccctccgcctcccaggttcaagtgattctcctgcttcagcctcccaagtagctgggactacaggcgtgcgtcaccacgcccagctaatttttgtatttttagtagaggcggggtttcagcatgttgaccaggatcgtctagatctcttgaccttgtgatctgcccaccttggcctcccaaagtgctgggattataggcatgagccaccgtgcctggtcacccccctccttttttttttgagacggagtcacgctctctcaatcaggctggagtgcagtggtactatcttagctcactgcaacttccgcctcctgggttcaagtgattctcctgcctcagccttctgagcagctgggactacaggcgtgcgccaccatgcccaggtaatttttgtaattttagtagagatggggtttcaccatgttggccaggctggcctcgaactcctgacctcaggtgatccacctgcttcagcctcccaaagtgctgggattacaggcatgagccaccgcagccggcctagtttgtctatatcttaaccaaccacatccactgtgggtcttcttttttttcttttttggaaaaactttaaaactgagacggggtctcactatgttgcccaggctggtcttgaattcctgggctcaagtgatcctcttgcctcagcctccctcagtgctggattacaggtgtcagccattgtgctcagcctcttttttttttgttgtgttttgttttgttcttagggacagggtcgtgctgtgttgcccaggctttactgccgtggtgcagtcatagctcactgcaaccttgaattcctggcctcaggtgatctgtctgcctcggcccccagagtgttgggatttcaggtgtgagccaccatgcccagccaaaagtgtttttcattttttgttttttgttttttagatggagttttgctgttattgcccaggctggagtgtagtggtacgatctagggtcactgcaacctctgcctccccggttcaagcgatttccctgcctcctgagtagctgggattacaggcatgcaccaccatgcctggctaattttgtatttttagagacagggtttctccatgttggtcaggctgttctcgaactcccgacctcaggtgatctgcccgcctcggtctcccaaagtgctgggattacagggcgtagccaccacacccggccagaaatgctttttaaaaacggttccacccgggcgtggtggctcacgcctgtaatccttcaaggcaggtgggtcacctgaggttgggagttcgagaccagcctggccaacatggtgaaaccctgtttctgctaagaatacaaaaattagcccggcgtggtgatgtgtacctgtaatcccagctactcgggaggctgaggcaagagaatcctttgaacctgggaggcggaggttgcagtgagccgagatcacgccattgcactccagcctgggtgacagaacaagattccatctcaaaaaaaaaaaaaacaaaaaaaaaaacagttccaggccaggcacggaggctcatgcctgttgtccagcactttgggaggctgaggcaggcagatcacatgaggtcaggagttcaagaccagcctggccaacatggtgaaaccccatctctactaaaaataccaaaacaaaaacaaaaacaaaaacaaaacaaaacctagccaggcattgtagtgggctcctgtaatcccagctactcgggaggctgaggctggagaattgcttgaacccgggaggcggagtttgcagtgagcagagatagcgccattacactccagcccgggcaataagagcaagactccttctcaaaaaacaaacaagtaagttccaattgggcgaacaaaaaagttccaattgaggaatttgaacactggatcatagatgaggttaaggaattagtaaatgttaactctaagatgtaatagtggcactgtggttatgatgtttaaaagcctttgttagagaccaaaatggtgtgctatctggaatttcatttaaaataatccagccggtcgtggtggttcacgcctgtaatcccagcactctgggaggctgaggtgggaggattacttgagtgatccaggttcgagtggtgaatatggtgaaaccctgtctcaactgaaaatataaaaattatctgggtgtggtagcaggggcctctaattgcaactacttgggaggctgaggcaggagaatcacttgaactcaggaggcagaggttggggtgagctgaggtcatgccactgcactccagccggggtgacagagcaagactccgtctcaaaaaaatgcagtgggctgtgggaggatagggatgaaacaagtccgtccacgtgttgataatggaagcgggctcatgggagttcgttatactgctctgcctccattaaatgcttgaacttctccataatagaaaagaaataaaagaatggatcaagttcagtagggtttctgtgcccttgagagcctccactcatagctatagaagcttgctgtgccttgtcacaatgaacagctcccgtcaaggggacggtgcctccttgctgagcgcttgtacttggtgttactgactttctcacagcttccaagtgcagcaggggttgctactcccatttttaagataaagaaatggaggcttgttgaggcaagcacgcttccaaagagtgagagttccaagatgggacctcgagtacctcaaagcctaattcccaactccacgacccacttccgttgagtctctgctctgggctgctacttagatgagccctcaaccagtgatgtcctgagggagagctgccgtcagggcgctgcacgcatacgctggctgtggggcgctgcccggcattgggtctgtgctaccttctttgagcttttgttctctatcttcaggacttgggggtaccattgctttgctgcatttgctttttacctttagtcacatttgtggcccccccaccccgggtaagcaagtgctccagggaactcacacagtgtgctggggtggtttccctctggctgcccttcaggaagctcagctgttgtttggccttcgtccactccccagccctgcagcattcattggtcccactgtcatgctccacagtaactgttagaatgcctgctgtctggcgttgccgggtgtgtttccttgctgctgtgacagctttcagctcttcattaaatgttagcatcttgtgaggctttttctaacctgccttgtaaagtcacccgtttctattctctgtcgtcatctgatgtgatcataggatctccttatttacctctttcattagcatatgaaccccatgagggtagacacctttttttttttttttttggagacagtctcactctgttgcacaggatagactgtagtggcacgatctcggtttactgcaaccttcatcgcctccctggttcaagcgattctcttgtcttagtctcctgagtagctggaccacacccagctaattttttgtgtatttttagtagggatgaggtttcgctgtgttgatcaggctggtcttcttgaactcttggtcacaagtgatccgcctgccttggcctcccaaagtgctggcattacagctgtgagccactgcgcccagcacctttttttgtcttgtttactgcgaaatccccaacaactatagcatttccaggcacatagtagatgcttaagaattacttacttacaagagcacaaacatcggcgaataaaaagaattacctattgaatgaatgagagttagctggtgcaaaaaaaaaaaaaaaaaaagccagtgcagattgagagacctggccatagaaaattacaacgctcagggataaggtatggcaaggaacgttttttgttttttgttttttttttcgctttattgccgaggctggagttcagtggtatgatctcggctcactgcaatctccacctcccagattcaagcaattctcctgcgtcagcctcccgagtagctgggactataggcgcacaccaccatgccctggtaattttgtatttttagtagagacggggtttcgccatgtttgccaggctggtctcaaacacctgacctcaggtgatccgtccgccttagcctcccaaattgctgggattacaggtgtgagccactgtgcccagcctggcaaggaacttgaggagtgggtggagagaacgctgagatggagttgttttcagacgtttccatttgtcccagatagcgattcccttaaattgtggcttaggcttctgttttctaaaatattcttaggccaggtgcggtggctcacgcctgtaatgccagcactttgggaggccgag[131 bp omitted]ctgaggcaggagaatcgcttgaacccgggaggcggaggttgcagtaagccgagatctcgccatccattgcactgaccttgggcaacaagagtgacactccatctcaaaaaaagtacattccttaaagtcatcttgaccttagtttatacttg[132 bp omitted]cgaaaccccatctctactaacaatacaaaaattagctggatgtggtggtgcacgcctgtaatcccagctgcttgagaagctgaggcaggagaattgcttgaacctcggaggcagaggttgcagtgagacgagattgcgccattgcactttaagcctgggcaacagagcaagactctgtttaaaaaaaaaaaaaatctgagactttatttctctagcttctggcaacacccacactgtcttcctgaaaaggtagcacccgagggttcggggaaggagcctggtagttcaagtgcccggggtgagaggtgaagtctgccttggcccttcgccactttaacacctccctttttctgtgtctcgagtttgttctgttttacttccatttgcaaaatagtaataaataaatatcagtgtccagcactgtgtctgggccatagtacgtgttcagtaaattatatgtctaatgttccattattggaacgctaagcatgtgggagttatttatatcctactgctcgggtcatcaccagggtctgatttttcacacgtgtctgcaattcaaaaaattgcaacctctggcataaatgggttaatgttattccttttctcatgctctcccagaatgtgacagggcttccgagggaaacactataccatggaagaaccggcagagtgtccttaaggccccggcaggagtcagggtcattatgtgctggagccaccatatttggtgaaaaggacttattcccaggcctgacccagcaggatcacctatgaaattggtttcttaggagattcctggctcttttctttggagattgttattccttagtagccaggtagaacagtttgcctcacagtagtgaggctggagtgagaatctgatctgacgctagtcagttcctgggttcctttttagagacacagggcacagacaggaaagcagagcttacttagtgtttgctttcctggctctcattcttagccttggggcagcttggtctcaggttttcctgtgggctgtagttgcagtctgtgtccagtaggtggcagtgtggccctgcctacaggagggagctcagaacctgggggcatcagctgcatctccagggaggcccagttgggctattactgtttggatcaccttgcatctgggagcgatagggcccttagggtttatgtaggtctgaaatggcagttgggcctgcccacatcctgtcagcttgaagtcagccttacctcctctcctcagcagcctggattatctctcagccactctgataaagcccactgtgcctcagagaaacaggttcagagaggggcgtccctgaggttgccaggtcaccacccatgttcctccagttaggggcctctcccaatgccaccgttttcttcttggcctctgcccatcgtatttgttttgctacctgagaccatggacaccttcaacttataaaattcctttcttcctgcacaggggaccctcacaatgatcccaatgctcagggggatgccttcaagactctcttcgtggcgagagtggtaagtccccagctcctagctcctggaaccccacgctgctgagagcctgggtctggcacaaaggtcaaataggctaggtacaggggaatgttccaggggctgtgggacagctctgttctcccatttaacgtcatatccatctccttgtagaattatgacacaacagaatccaagctccggagagagtttgaggtgtacggacctatcaaaagagtaagtggagtgggtcagggtgtttgaattgggggtgcatggaggaggggctgtatcctgagagggagggagagaggtcccagccctgagcatggctcacaccatttcagggcctggatttatgcatcctgactgtatctccatgcagcagaccttgggcagcagaagtaaaatgagaagtaatgactgctggtggttggttgagagcaggggttggcaaactacagacttaaagttttcctgctgctcagccaggcaggtctgtttgtttacacattgtctttggctgctactgttgtaaggcagggttggattgttgcaacagtatacggccgtccaagctggaaatatctactctctgggtcttggcagaatacctatgctgagtcccgttttagaggaaggctttgttttaccaatcttcttttaagtcactgaagtgctctgtgtctgatttcctttatctaacatgggagacgcatgccttcactgggcagtagtgagggcttgaggccatcctacacacaaactgatgttagccatgtctcttctccctgctctgtttctgatacgtcttttaaaaatatttatacatgtcaggccgggtgcaatggctcacacctgtaatctcagctcttaaggaggcagaggcgggaggatagcttaaacccaggagttcgagacctgcctgggcaatatagca[143 bp omitted]tgaaacctggtctgtacaaaaaaaaaaaaaatacaaaaattagctgggcatgatagcgggcgcccgtaatcccagctactgaggaggctgaggcaggagaattgcttgaacccaggaggcggaggttgcagtgagccgagatcacaccactgtactccagcctgggcaacagagtgggactccatcttaaaaaaaaaaaaaagtattgtaggctgggcgtggtagctcacgcctgtaatcccacatgttgggagggcgaggcaggcagatcacctgaggtcaggaggcaagaccagcctggccaacatggcgaaaccccgtctctacaaaaatacaaaagattagccgagtgtggtgtctcgtgcctgtgtgtgtgtgtgtatgtgcatgtgtatatatgtgtacacacacacacacacgttgttctgccttgcacagcccagtgacaaccttggccccacccttgtccctctgatccattcaagtcaggaatcttggttgtgttttggaggctgtggggtcccaggttcatccatgatacaggttggtcgccaactggtagtgatgtgaatggcgaactagccatcctttagggaccagctcaaatgctgttacctcccagaaatcttccctggttcattctggccacctctgtctcaacagccctgccttgcccgttgttctccctgacatggtccccaaggggtctttctgacatccagagctgaccccatctctgctgacagcatcccatgggtccctagcatgttaggacaggtccagctgccaccatctggccttccagggctcttccccaagctgtgtggcctcatggacctccaccccaccccatctcctcccttctcttgctgccatcctcgggatgggacgcatccctcatcgtgccacgttctctcaagcctccctggctgtgcacgtgtcctttctttttcccttagaacttccctgtccttggccaggcacagtggctcacgcccgtaatcccagcactttgggaggccgagaagggcagatcatgaggtcaggatttcaagaccagcctggccaacatggtgaaaccccatctctactaaagatacaaaaaattacccaggtgtggtggcgcacgcctgtaatcccagctacttgggaggctgaggcaggagaatcgcttgaacccgggaggtgcaggttgcagtgagctgagattgagccattgcactctagcctgggcaacagagcaagactctgtctccaaaaaaaaaaaaaaaaaaaagaattcccgtcccattggcattcacaactccctcctgtttccctaattccatttgtgtcctcctgactccacgtagaccacccacattggcccttccttgctcaacacccttcccagctcctcagcgaccacacttctcggcctggcattggggcgcttgatgaccccgggcctgcccacctttgtggcttcatctcctgggactctctgtcatcagtacatgagccagccctgccgaagcgcatccccagcctcctgccctcctgcccccgggcccttggacctctggagttactgctattccacctgacaggctgacacctcactgtcttccttcatctctcttctttctttaggtcttagcttaagtgtcattttctccaggaagccgcctctgtgtcctctgctcctgccattagaacataagtcactcagggctcttgaaggacagagagggtctgaggcctcatccggcccagggcctggtgtgcaggctgttgtggggttggtggggcggagccgccctgtggcaggactcacccctgtccccatgtgccccacagatacacatggtctacagtaagcggtcaggaaagccccgtggctatgccttcatcgagtacgaacacgagcgagacatgcactgtgagtacctcccgccgagccctgccctctgacctgctctcacttctctgctgccccagcccctcccagtctgtcccctcccccaccctgccacacctgacattagcgatgtctcttctcctcctccctctgtttctgatgtatcttttttttttttatatacgtgttttttaaaaaacaaaaaccaaatcccccacaacgtgtgtgtgtgtgtgaacctggggaggtaagtgtcacacgttgaacctcaggggcaaagagggaactgggtggggggctggggccagctggaggtggggggaggggtcggattttgggggaacctcccccattccccccactgaagttgggggtggccaggttgcaatgaggactggcctttgaacctgccctctcttccccccccagtagaactggggctgggccacccgaccctccgcttccccaaccctggccccccaccctgttcctcagcgggcagtggggtgataggcatgttgagcgcctgcccctacagttccaaagccccctttgaggctgccgcggcgtccacatgggcagggatgggtgggggagggtgggcagggctgcggcgtgtccaggggccgccgtattaattgactgttcttattgtcactgcagccaccacgcagctggcttgcagctgatgcttacgctccccttacaacacctcagtgtatggttggtataagggtttgtatcatgggtaagatcactcagcaccgcacaccagcccagcttagccaggcagctcaggagcagcgaggcgcccctcctcccaccccagtcgcccccgtagcctccccgcacccatggccctttccttgtttgggtgccctttgtccctcctgccccgatccgtatgctctctgagaatcttgctgatcccaggaggggaaggatgaacctggtgggaaaggcggcggcctctccgcttgggttccacccagcctctgatgacccggcttcgtgatgtcagcggcgaggtggcaggaacaccgagggcagggctccaggccagggctccactggagcccttcagccttccctccctgcccccgtgctttctatggggctgctactgtgctggccctggagagtctttttggctgctagttttggggtgctctgccccctttctgtcttccttactgtggttgaggcctcccgagggggctggctgtggtgtccagcagctctccagaggtggtcaggagctccctaaagtgcatggaattggggcttggggtgtgggagggaccaaggggtaggctgctagcagctgaaggtgtcgtaggtttttactaaagaaccttccactgtctagagacttgagagagggaaagagagagagaggcctagacgaacacaatcacatgttttctttgctgttcctcccgggatgggcctgttttggggtttgggactctgaacccgagcggggttccttcgcttgactttgatcctggtccttaaatgcctttccccactcccctcccgtgggttcaggggccaagcggcccctcctcagagcacgggcagcaccgtctcctggacccctgtgtgccagcctctgcagacgcagctggtgggagggagcatggatttggaggtggagaagtcactcctggtcctcggagggggtgggctgtgtgcctagttcagtgtgactcggggattggtgagggcggacaggtttctgaggcctccctagccttctttgtaaattcacacgagatagtccagggctttccagcgcccagcttggatgataatcctcgtctcccccactctaaggcctccttgagatttctttggggtctaccacgtcctctgcctgtctccaggtggtacaggagatgtggttcctctccctctcctggctccctagaaccccccacttcccctccctgtagctttagctgaccccgtggtggtgggtgtggggtctgtgcgcgtgctcaggtaagcttgggggctccaggtaagcggtcccgtgtcccccccccgggaagcccgcctcctcgccaggcccccaggagttgccgagccccccccatcccgctcggtttggacacccgcaaggccggcatcggtaaatggcacctttttctcttcctctggttgttatttgggggggagcgggctggggcggggcagggtattacggttggttgaggacagccccctaggccagggctgggtgggggaacggggactttttggccttcatgacagccccacgttgatcacaggccagggcctcaggcttgccttctgctacgcgctgcccgagagcagcagtgagcctctcccccgtctcccctctacgactcccctttcctggcaggctcaggctggggtgcgctcccagcacgtgttgagccgggggtgtggagggcgagatggggcagggctggggggaggcagagtcagtcgtctcaggtaaggcagggattttcagtagcaccgcacggctccccatgcttcctccactgcccctctcccctgctgcaggggccccgccaggccccctgggagtgtataacccgcctctctgctccctgccatttcctgaagatttctcccacccccttctggttcattttctgttctgatgtctgttccccccacactcacccccctccaaaaaaaacaaaaacagaaaaaaccggtgtggtctggggtgcggagcgtcccagctgggcctcctgccccggcttggtgtctcagggtgcatgcttggggttgtggaggagccccctcccccacagcagagtccagcgtggagttaaccttcagtttctttgcagcgattttggccgccctggcgggagggggctgttccatcatgtgggagaggaagggccggggagcctagggggtggcgggtgagggtggacgtctcccccgaccaggagtggttggggcgctgagaggaagcagacgctgagatggagcaggcccttcaccggtttgggagagggttggtctggctgtcagttgcctggctgtctgttgggcgtgtgcgtgtgcgtgatgatggggacacggggcggggattctgtagagctgggcctgtcctgactagaggaccctctggggactcctctcccctccccctccccacatctgttacagccgcttacaaacacgcagatggcaagaagattgatggcaggagggtccttgtggacgtggagaggggccgaaccgtgaagggctggaggccccggcggctaggtgagcacatcctgccttcgacgggctctcgggggccctgggcctggtggccttgttctcccttctctgctgctttctgcttctctgtctcctgccggcccacctctcccatcgcgtcctcatctccggcttctctctcttgtggccatcacatttctgacagctgcctgcctcctcgttctgggttactgtgaggagcaggggcaccagcctggagaggcctgagcccacatgctggcgtccgcccttgctagctgggggtccccttttcctgcctcattgtactcctcttagtggaaataaccccgagttcactgagctcagtgtactgggcgcccagcttggcagtgacgcatgctggggttgtaaatgtcactcgctcatctgcttctgctgcttgctgttgctcttgttcactcttttactgattcagcaagtacctattggatcaccagctgtgtgccgggcttctagttgagcaacacagaggcagcctctgccctctgagcctcctgcattcggtctcctcattgtcatttgctgtctcaggcaaggtcagtttggctgcaagtatcagaaataaacttgagcttcctgaaacataaagggccctgttgatgtagaatcatgggcatcctttggagttcggaggtatgtgatgtccgtggacctgagaacct[144 bp omitted]ctactaaaaatacaaaaattaactgggcgtggtggcgggtgcctgtaatcccatctactcgggaggctgaggcagagaattgcttaaacctgggaggcagaggttgcagtgagccaagatagagtcactgcattccatccagcctgggtgccagagcaagactctgtctcaaaaaaaaaaacaaaaaacaaaaaaactggggcgacccacctgtgatgtgtgacagcccacagcttgcttctgcctcgtttgcctccatgcagctaggtcggtcccatgcctctttgcactggcccagcgcagcaggccacaggccccagctttacactcagtcctggatgagtctcttgtttcggggtgggcacatttgattgactcagtgttgggcctggggtcctgttgctcaggcatgcttattgaggactgaatcctgcaaagctgagtgacagttgtcagagaagatgatggtccctgggcagacacccaggcagtagtagccacttggggctcctgtcctgcctcccagccctgtgtcctggctctggactcgcctgtgctagggagaccacgctctcagctgctgagcctcggagcttaccaggcatgttcttaccttactctggtctctctggggtggagtgggttcttatagctctgctgtttcctgttggggcgggaaaatgctagaatctcagtctttccagaatctcagaatcttctagttcaattgccattcaaactttttgttggtgttagccaataacatcttgactcggtgcacccgcagaaatactgtaacctaaagtttgaggaaacagttttttctatgtagtaagtatatagttgtattctgctgttttgtttcttaagatgttggttgcaacccatcagattgatgatgggactcatttctgggtcatgacctgaatataggaaaggctagtctagctgccctgtgcctgtgacatggcaggtgcctggtccgctgcctgcttctataagaatgtctccctgcagcctcttttctatacagaactcagccctgcctcacggaagcttttccaggcagtgcgagatagaggagcgcttgagaaggcaggttttgcagcagacggcagtgacagcccagttctgcaccttctttgctgagtcactgtgggccagtgacttgatctgagattgtttccccatcagaaccatgaggttatcatctgtgccttggggctgttcatctatctattcacttgacacacacacatccacctttctataccagctgcagcgccacctgctggtaccgtgagcaagagctgggcatgcccacggttccggtgccctgcagtctggtgggagaggcaggtaggggtcgactcaggtagcaaacctgaaactccaggggaaggaagcgtttctgcaactgtgagtacataggactgtgaggagagacttcccgagaaaggatgttcgggctagcgttaagggtgagcgtgagttcaccagagaaggaaggggagaccagtccagggcaaggagaatgcacagacactggcaggaaggtgagcgtggggacactgggaaaggcctgggacacgcagccaagagccgcggctcagacgctagcagggcccgctcttgctgcctctaccaccagttgacgaggagtttggaccttaggctgggggacgccagcaaaggcttctaagcagatcacatttttgggtggaaagatcattggcttcgggtttctgtgagggcgaggatgattggaagggagggttttgaggaggctgtgaagtgcgctatggttaagatgatgcgctttggggccagacatgggttccagtaacggctgttgcctagcgaacgctttgtgtgagttaattagagaagacgtggctgtcttgtgatgggagtgcgcgggatgaactgcacggggggacccggccctgtgaacactaagccaggggctgccttcctgccctttgctcttggagtcggctcatttctgctcctccgggccctgtccctgcccagattcaccctctgtccgtctgccctgccccaggaggaggcctcggtggtaccagaagaggaggggctgatgtgaacatccggcattcaggccgcgatgacacctcccgctacgatgagaggtaagattgggcgaccggtgtcctggggtggggggcggtcacggggggagcccagccacacaggtctgcccacctcatccaggcccggcccctccccgcttccgcacagggaccgggaccgggaccgtgagcgggagcgcagagagcggagccgggagcgagacaaggagcgagaacggcgacgctcccgctcccgggaccggcggaggcgctcacggagtcgcgacaaggaggagcggaggcgctccagggagcggagcaaggacaaggaccgggaccggaagcggcgaagcagccggagtcgggagcgggcccggcgggagcgggagcgcaaggaggagctgcgtggcggcggtggcgacatggcggagccctccgaggcgggtgacgcgccccctgatgatgggcctccaggggagctcgggcctgacggccctgacggtccagaggaaaagggccgggatcgtgaccgggagcgacggcggagccaccggagcgagcgcgagcggcgccgggaccgggatcgtgaccgtgaccgtgaccgcgagcacaaacggggggagcggggcagtgagcggggcagggatgaggcccgaggtgggggcggtggccaggacaacgggctggagggtctgggcaacgacagccgagacatgtacatggagtctgagggcggcgacggctacctggctccggagaatgggtatttgatggaggctgcgccggagtgaagaggtcgtcctctccatctgctgtgtttggacgcgttcctgcccagccccttgctgtcatcccctcccccaaccttggccacttgagtttgtcctccaagggtaggtgtctcatttgttctggccccttggatttaaaaataaaattaatttcctgttgatagtgggcacctcggtttcttcctcactgctctgttttccccagaaggttgttcctgacttgatagccctgcttggtttggtttccagggtgtacttaaaacttgagcgttaggacatgaggctggctctgcccagtagccagagctgttgaaagtggggtgaggcggcctctcgggctccttgtctcccttgtgtttttcacccttttttctttttcatctctgccacacattcctcagggctgaccatacccctgtcttggtggggggctgggaattaggagggggcttgattactcaggggaagccgcagttttgaatatgcaagggaagctaccatctgcaagggagagcggcacacagggtgaggaaaggcagaatacactgggcacgggtgagacggggcagagcaggaagggtggacccacatcataataagtagtgacagaggagcaacgagcagaaacacagaagaggttccaccagcaattgagatttcaagcagattcctggacaaaagattaaagacattggtggtgagaacacttcagtctggtgagtgcagggaaggaagcctgtcagccttgcagaaccctagagggccaaggctgcagctccaggagagcaagggtgggaggccagagggagagcggggtacagaacagttggcctccctgttggcactcaggatgcctgggagctgggccgggggtgcctaggcaaacctgcttgtgttcagacctgcttgtgtcttgtagaagcgtctcagcctgaaggcaaacttggcctgataactcagagggtctgtgactgacacgcaggatttcagtctgctttttaatggcttcagtttaaccaacggaggatacccagacatttgaggaaaaacagaccacaagataaatagaaaaactgaccctggaagaaatgacttaggaataaaagaacttcatacctctagttactatatttcatagatatcccagatactgcaactataagacttctagtattggctacaagaagcccattttggactaacatggcacagactggttacataaaggctggacaataggcaaaaacttagaaaaggcgccagaaagtggccagctttgatgaggcttgagggggtgtgatccgttaagagaacacacaggtgtgtttcgcacttacccttgccttttccttgaggatgttttgccatttagcatgaggaagtcaggcgggactgacttccactgggccaagttcacagaggttcagccaggcagctgggacttgacgaaacaggagaggagggcactgacctcccaaatctacgtgcaccctcccttagaggcatctgccaactcaagctgctcactatctgcaagacccccccccccaagaaactcatcagaatgcagtaactgggaggctaaggaactggtggcctggagactgcagcagccatgctgttctaggggagacaggttggggttcaaggcccaccatggattggctctgcttgagatggccagggtgcctcaatgtcagagtaacgccataacagaagaaatcagactaagaggctgggcatggtggctcatgcttgtaatcccagcacttcgggaagcagaggtgggtggattacttgaggtcaggagttcaagactagcctggccaacatggcaaaaccctgtctctaccaaaaatacaaaaattaccctgaggccaggtgcggtggctcatgcctgtaatcccagctctttgggaggctgaggtgggcagaccacctgaggtcaggagtttgagaccatcctggccaacatggcaaaacccaatctctactaaaaaatacaaagcattagccaggcatggtagtgagcacctgtaatcccaggtactcgggaggctgaggcagaattgcttgaacctgggaggtggaggttgcagtgagccgagatggtgccattgcactccagcccgggcaacagagtgagactccatctcaaaaagaataaataaataatcaatcaggctaagaaagcctaaaaccagactttttcaggatttaggcagtctgctagtcagaagaaaactctggaagaagataacgttccgagtctccacatgtactatttttagtacccattactcagcatctactcaatagttaccagccttgctagaaaggacttaatttgctgaaaaccaagagggaaacaaaatagacaatagaaagagacccaggcaggggtgattcagatgttggagttatcataactatgatatattcacaaaataaggaaaagatggagaatgttgagatatctggaatctagctacttgagaggcagaggtaggaggattctttaagccaaggagtttgagattcagtgagctatgatcacaccactgcactccagcctgggtgacaggaagaccctgcctcaaaaaaaaaaaaaaaatctggaatctaacaaaaagttaaatggcaattctagaactagaaaacacaagtgaaattaagaattaagtaggtggtggccaggcatggtggctctgtaaactcaacactttgggaagccaaggtgggaggatcacttgagcccaggagatggagaccagcctgggcaacatcgcaaaagcctggtctctacaaaaaatacaaaaattagccaaacgtggtggcgtgcgcctatggtcccagataggaggctgaggtggaaggattacctgagcccagggaggtaaaggctgcagtgagccatgattgcacaactgctcttcagcctgggcaacaaagtgagaccctgtaacgacaacaacaacaaaacacacacacacacacacacacacacacacatatatatgtatatatagagagagaaatagcatgttacttagacacagaagcagctctcagactaaacatctgtaagttccctctcacagtgagtagagttaggagaggtagaggctggtgcttttcactattattagcctgtctgtgttatttgattttgtttttaatcccataaagacattactttttgctaaagagagagctacagtgaaggagacagccagacaaacctgctctagtcctcccacttggaacaagcacttttctggactccatatcgccacccagcagaaccagaagagcagccaactttctccaaagtcttgtccacatctcctcggcctctctagagcatgataccactgaccacttcctttttttattttttatttatttatttaattttccaagatggagtttcgctcttatttcccaggctggagtgtaatggcacgatctcggctcactacaacctccacctcctgggttcaagctattctcctgcctcagcctcccaaatagctgggattacaggcacccgccaccacgcccagctaattttttgtatttttaggagagatggggtttcatgaagttggccaggctggtctcaaactcctgacctcaggtgatccgcccgcctcagcctcccaaaatgcttacaggcgtgaccaccacacctggcctcactttttttgtttgtttgtttgtttgagacggagtttcgctgtttttcccaaagctggaatgcaatggcatgatctccgctcaccgcaacctccgcctcttgggttcaagcagttctcctgcctcagcctccccagtagttgggattacaggcatgcaccaccatgcctggctacttttgtatttttagtacagacagggtttctccatgtggtcaggctggtctcctgacctcaggcgatccacccgcctcggccccccaaagtgctgggattccaggcgtgagccaccatgcccagccacacttctttttaaaaacactcgcagccagacacagcggttcgtgcctgtaaactcagcactttgggaggccaaggcagggggattgtttgagcccaggagttcaagaccagcctgagcaacaaagacccctccatctaaaacaaacaaaaaaagaagataaaatttaaaaacccctcttctcatggtttctcccacctgggtttctgcctacatttcaggccattctctgctgtcctcctgacttttaagtgttagagaggtctggggaccagttctaggccgtcttaatattcgcttgcccctgacattcttatccactccggtggttttatttaccacctatgccccaatattcaaacatgcctgcagaccaggttgctcttttgagccctagacctagatcgatagtttctccccatggattctgcataggctcctcaaattcaaaatatccagtatcggccaggcaaggtggctcgcgcctgtaatcccagcactttgggaggctgaggcaggtggatcacttgaggtcaggagttcgagaccagcctggccatcatggtgaaaccccatctctatgaaaaatacaaaaatttggcaggtgtggaggtgcacacctgtactctcagctactcaggaggctgaggcaggagaattgcttgcacccgggaggcagaggttgcaatgagccgagatcacgccactgcactcgagactgggcaacagagggaagactgtgtctcaaaaacaaaatatccagtatccctctttcagtgtagaccatcttaaaaatggcaccaaagcaccttaatactgtcttctcctgcacctcccaatccccttatatagccaagcaccaaggcttgtctagacatttcccacatctgcccacccatcttctgtgctttggccctggtgctagctgccacctggatggctgtggtagcctcgtaagttgccccgctgcttctcctcttgttcttgtccaaaccagtctccacagtggctacagtgattttttttttttcaatagatacgaggtctcactatattgcctatgctggtcttgaactcctgggctcaagtagtcttgctgcagcctcccaaagcgctaggattacaggtgtgagccaccgtgcccggccccagtgatcttaaaatacaaatttgaggcccaacctgggcgacagagcgaggctccgtctcaaaaataataataataataatataataataatacaaatttgagtgtcatatttttctcttaggagtttgcatgaagccccaaatcctcaaggcgcatatgccaacgcaggagcccaggcataaactatcctgccgaccttttcacctcatcatcaaccaatcctaactctgcttccagccacgtgggctctttctgggtggtgggggtgacccaagctccacctcttgttcatcttacctcccaggactgtatgtcaatgtccctcctctaggatttccttcgttttctagatcatcacctccccactctcagctctcatcacagccgtagttggtcgtctacctcccctatagactggaagcttcgttcgggccgtgggcttggctgtcctgctcaccacggtgtccatgacttgggctcagatgtttcacaagagtttgttgaatgaatgtggggaaaggatggacaggggatagacgggtgtggagggcaggcagacacggatcctgaaaggtacacacagaccgaacctgcagtgggaggggtcgccaacaggaccgactggccggggcggagggcagggcgcggctggcgcgcggcaggtggtcggagcagtcgggcgagggagagctgggcgctctccaggctgcgcctccgcagggggcgcccgtggcccggggcgtggcctcgcgcagccccgccctcctcgccggcgccagggcaggcgggcggctggcagctgtggcgccgacatggctgcgctggtggagccgctggggctggagcggggtaagcgtgcgccagggggccctgcccacccgggccgcggcctacatacccagcccccggtccccgcccttcccgggtcaggccagtgcgggtgggccagcggacccggagggggtgggcggggcgggcgccggggccgggcggtcgctaggtgtgggaggctccctgggcgcgggccgggacgctgggcgcccgccttacaacccggcctgtggaggggtcccggggccgcagggccgctggtggcagtctctcctgcgccaccctggactctgcggggtgtccgactaggcttcggccgtcctccccggactgtgcgctcggcctcactccgccgctctccttgcttctctgcgtctcggggtctctgacactcggggtttctgcgccccgcccccgccccgcagacgtgtcccgggcggttgagctcctcgagcggctccagcgcagcggggagctgccgccgcagaagctgcaggccctccagcgagttctgcagagccgcttctgctccgctatccgagaggtgaggggcgcgcggcgcaggggcgcgagctggtggccgtcgtcctcctcctcctcctcctgcttgtcccgagcccggagactacgcctcccggcagctcccgaggcggcccgccttggggtgccaacgcttcagctcaggggttcttcgggagttgtagttttctcggccttctgttgcgggggcggggcggatccttgcgtggtagcgggagagggtctagaggcctgaactcctgcgtctagggctggaggagctggcgactccctgatgccgctgcctcctcacccaggtgtatgagcagctttatgacacgctggacatcaccggcagcgccgagatccgagcccatgccacagccaaggtgggccccgcaccccattgctcctggtgtctatttaactgcctagtcgaactcaatatctccttcatgccagtcatttctgtttcctccctcatgatttttgctaaatctatgtgccaccttactattagtaaataatcgcacatttttaacttaaatgtcatactaaggcatctttagcaactgcaaatggaaacagtatggcatggttggtagaagataaccttcaacatctgtacagtgcaaaccaggaaactcatggcgctctgacctctcactgcacaatagttagatgctgctacctcttgctgctgtccggaggctcagatctccctccaggcctggctttcctctgtttaaaagtaagattgaggccaggcacggtggctcacgcctgtaatcccaacactttgggaggccgaggcaggtggatcagttgaggtcaggagttcgagaccagcctggccaacatggtgaaaccccgtctccacagaaatacaaaaaaaaaaaaaaagaaagaaaaagccgagcgtggtggcgagtgcctgtaatcccagctggattacaactccggaggctgagacaggagaatcgcttgaacccaggaggccgaggttgcagtgagccgagatcatgccattgcactccagcctgggcaacagagtgagacttcatctcaaaaaaaaaaaaaaagtaagattggcaagtatggggtattcaagacacacaccaaatggacactttctcttgcaagtgaacagaaagagacgcacagtcattacagggggatcgtgcattgtgccatgacaagtgtcccatgcttggggatagtaacccaggctaaatcgctgtcctcggtccacatcccccaccccagctttcatgcctacctggaaggggccctcatcttcagtcgctttctctctcccaggccacagtggctgccttcacagccagcgagggccacgcacatcccagggtagtggagctacccaagacggatgagggcctaggcttcaacatcatgggtggcaaagagcaaaactcgcccatctacatctcccgggtcatcccagggggtgtggctgaccgccatggaggcctcaagcgtggggatcaactgttgtcggtgaacggtgtggtgagtggagggctgaggcaggactgggggacacagtctgtctaacgtagcatagcccctgcttttgacattcactcaacacacactgagtgttgtctgtatggctagccctgtgctgggcaatgttacagactctgagagatgttggcctcagctccctacactcaaccttctctctctggggagggcagtaggccccggctgaaatagtcctaatccagagacataataatgaggaagtgcaaagtattgtgacagcccagatgtggcaccaggccagcatagatacaggaaggttttgcagagtaaggaacatttgggttgggtgttaaaggatgagtaggagttctccaggcaaacaaggtacagggtgttcctgctgagggtactgtagataaggatactgacttggcatacctctgagctgaaaagaaagggcttagttctgatggaggtctggggcatgcaggtaattaaaatcactgtggttaggctgggtgcggtggctcacacctgtaatcccagcactttgggaggctgaggcacgtggatcacttgaggtcaggagttcaagaccagcctggccaacatggtgaaatcccatctctactaaaaatacaaaaattagccaggtgtggtggcaggcacctgtaatcccagctacttgggagggtgaggcaggagaatcgcttgaacctgggaggcagaggttgcagtgagctgagatagcaccactgcactccagcgtgggtgacagagtgagactccctctcaaaaaaaaaaaaaaaaaacaaaactcactgtggttagagttgagggaagcataactggagagatggctggggtcagccatacaggacctgagtgccagcctgagaagctgggactttgtcccatgggtgctggggagctatgggaggggtgagccagggataaactcagcttgcaggtgcagaaggaccactctgggactctatgggagatgaactgaggggagagattagaagccaggccagggaggaggctggggtaagagtccagagaaaagaggacaaggcctgagctggcccagggctgtggggacaaaaaagagggagtcaaggcgggcggacattagtgggctgtgggcagggaggccacaaagatgggtctggacgtttggccagggactgagggaacacggggctgtccctgacatgggaatcctgggaggttttggaggaggacactgaaccaggagttaatgactcccacgaggaggacatgaggcattgacatctcagggctggcaccaggctcactagcagtgggtcccatctcccagtgggggctggacgagggcagcgggccccaggctcagctgtctgtgttgggccctgcagagcgttgagggtgagcagcatgagaaggcggtggagctgctgaaggcggcccagggctcggtgaagctggttgtccgttacacaccgcgagtgctggaggagatggaggcccggttcgagaagatgcgctctgcccgccggcgccaacagcatcagagctactcgtgagcccctgggtcaccacacccctggggcctccacgggctccctttaaccccaggctcccaaaccaggccagtgcttcctggatcttccagccctggcccctcctctgggatcctgacccttgacccttggcccaggctctcaccccaggctagtttggccaaatcccctggggagcccttagcttccttccatcccaagatacggaacctactgtggctgggatccctcagcccacttacctgggcccttgcctctgcaaccccagtcctgcccctcttgtctacccggagcctccctgatcccgggtcccttgtccaccccccttgcaggtccttggagtctcgaggttgaaaccacagatctggacgttcacgtgcactctcttcctgtacagtatttattgttcctggcactttatttaaagatatttgaccctcactgagtgtctgtgtgtctgtcctgcatccctgggttggtgtcttgagatgtggagggaatgcgaggagctgaggtcaggccaagccgttgagaagccttttccagagtctgagaacagaggttaagacctctccctaggtctgaaggcggagacaggccggcttccaagagactagtccgagggcggagggcggaggcagggacccagtctgggtctgagtgctggggcagaactgaggacaacgctgcctacccttaagagcgtctgagggcgaaggccaagtcccttcctccagagtcctgaaacgcagccggagccagtgggcggcctctgtgtgggcggggcggagcgaaccattagcctcgtccgccgggggaaccctgcaggccgcactactgtctgcgtgggagtcgcgggtgggggtgccgcgtgcagttcccgaggcgggcgcaggggtgcagaatgaggtgccctcgcccaccgggcgctcactccaccttccaaacacagcgcgtctttccggaagcagcccccgccttgaaatccaacctttagcctcatcccgctgcccgcccagccctcgtgtcccgtgcggcgcgagggctagtgcgcgccactgccgggagccggggtcgcgactcgcgttccacgccgcgcgctactcgctccaggtgacatcatccccctgccgggctccgcctcccgccccagccgcctcacgccgcgtgcctattggtcgacgcgccttatgccccgcctctcgctctccgcccgcgcgacccctcccggccggtgtggaggcggggtctagtcgccggccggcgccgacgctctctcccattggccgctcttcgccgtctgtcagtctcctgttaaaggggccacgaccgcccgggagccgtggggggggagggggagggaggaggaatttttttggggggaaggtgggatttggggggcgctggtgggcacccctggatctggcggctgcggcctcgcggggggaggctgatcggtgacaggggcagggggctattttgggggtagaaggcagtgagagcgtgagggggaggggggtccccagcgcccaagccggagccagagacgcggagcccgcgcgagcgtcggagacagggctccagggctccgaagcgacagagccgggccccggccgctgccaggggccccgcccggcccccccactccaccccacgtccctcctgcagcccagctccgcccgcagccgccgcggaccaggcaggtaagagcccggcccggccctcctggcagcgcccaccctggggaccccttggcgagcctcccccgcctccccgagatcccggattcccttcctcatcccaggggacccccgagcccagatttcacaccccaaccccggggactcaggcgtgcccctcccggcgcccagagtccccgaccgaaccctagaatcccgggcgcaccgccgcctcgcgcctcctccagggcccaggagcttggatttcccggtccggccccgggacccctcctagagcctagatcccccttcctgaccctgtcctgggagctccagacacccgccgcggcggtgccagactccccagacgcgtccgcatcgtccccgcttcgcgcactccgtctcccgtcgccagcctcgggcttgcacagccggctgcgtcccacggtccaggcaggctcggcggccgccctggacacaggcccgctctggagctgtccatggtcagcgcgctcggcagcctcgcctccccccacctcctgccgccgccaccagggagggggcgcaggcggcgcggggatccccccgccgcgcctttgacccgggaatacccgggccctccccgaccagggcgccccagcctctgggttctgccggccaggctcgtggccccgtcctcggcaccccaggttcctgggactccagctgctccctgaggatccagggcttctgaattttcctattctggtcgccgtggggaccatggcacccggggatgcagctcccaccccgttcgggaagcctgtccgtgtctacacctctgctggccccaggtggtagccctcaccccgtcagcacctaggaatcctgttccccagcgtttgctctgcttagaaccccgctgtgccctgcagacacacagacttagcctcctggcacccagcatctgctccccgagggactcaggcgccatgactcctttcctttgggggacccggaatgtgattctcaatgcagttctctgacttctgttcacactcccacttggggacctaaatgtcttggtcccagtctcctatcccctcagggacccaggagttcagaccccagcttccgtactgcccaccagcttttactgaggctgtctgcctcaaccctctctccaaacaagacctcaggctctcaccttccaatcccccatcatttacctccacaaggattcaggagtccaggctcccagctctgtccactgccctccccagcaggtatctagtttctcaggtctcacttttaggaaccaggtcttcacagcctcatcactctgccccatcaacttcacatctcctgtggccctaccaaacccctgtctcatcctcatgtcaccccaggtggcgggcttcaggactctctactctttcccctaagatgcagcttgttgagatgtttctagcactccattgccccctgaggctcagatgagttccccttctccaagtacactctcccaggccaatgagccgaacacacatcacctcctccagatgtattctgtggcctgggctcataaggagatctagaagctacctgctgccatacaaatttctttctttctatttatttatttatttattttgagacaaggtctctgttgcccaggctggagtgcactggcacaatcacagctcactgcagcctccacctcctaggctcaggtcatcttcccaccttagccgcctgagtagctgggaccacaagcactcaccaccaggcctggctaattaaaaaaaaatttttttggccaggcgcggtggctcatgccggtaatcccagcactttgggaggctgaagcgggcggatcacctgaggtcaggattttgagaccagcctggccaacatggagaaaccctgtctctactaaaaatacaaaattagccaggcgtggtggcacatgcctgtaatcccagctactcaggaggctgaggcaggagagtcgtttgaaccccggaggcggaggttgcattgagctgagatcgtgccactgcactccagcctgaacgacaagagcgaaactctgtctcaaaaaaaaattttatttatttatttatttatttattttttgtagagatgggggtttcgccatgttgcccagactggtctgaaactcctaggctcaagggatccttctctgttggctcccaaaagtgctgggattacaggcatggccatcgcgcctggccgggccacatttcttgtcgcacatgtgctcttgcattgctccatgttctagattccttctaaacaccagaacactcccagctgatgtctgttctgtgttccattttcattccaggcatggtctgagttctaggccagatgccaatttttttttttttttttttgagacggagtttcactcttgttgctcaggctggagtgcaatgctgcgatcttggctcaccacaacctctgcctcccgcgttcaagcgattctcctgcctcagcctcctgagtagctgggattacaggcgcctaccaccatgcccggctaattttttgtatttttagtagagatgggggtttctccatgttggtcagactagtctcgagttcccgacctcaggtgatcacctgcctcggcctcccaaagtgctgggattataggcgtgagccactgtgcacagcctttgtttttttcatatatttagataagacccctgagccagattctgatcccaccatatcctcagacatgttccaaagttctaacaacaagtccttccttctttgctaaatgttcatttcaagtgtgttccaggtttcagccacgttgttctagattccattctcttcccaggagcaatctaacttctaagatgtgtgtgttccaagtatgtgctctaggcttcctaattcgtgccattgattctagaatgcccttccctgtttccctgttttaggttctaaggaagttctatctaattgcacattcttttttgttgttgttgttgtttagttgttttttttttttttttttttggcgggggatggagtctcactctgtctcccaggctggagtgcagtggcgcaatctcagctcactgcaagctccgccttctgggttcacaccattttcctgcctcagcctcccaagtagctgggacaacaggcgcccaccaccacgcccggctaatattttgtatttttggtagagacggggtatcaccgtgttagccaggatggtctctatctgttaacctcgtgatccacctgcctctgcctcccaaagtgttgggattacaggcaggagccaccacgcccggcctgttgtttagtttttattttatttttgagacggagtctcactctgtcacccaggctggagtgcagtggtatgatctcagctcactgcaacctctgcctcccgggttcaaacaattctcctgcctcagcctcccaaatagctgggactacaggcacatgccaccacgcctggctaattttttttgtatttttaatagagacagggttttgccatgttggccaggctggtctcgaactcctgacctcaagtgatccccctcctgcctcccaaagtgctgggattacaggtgtgagccaccacgcccggcctgttatcgttgtttagacattggatctcattatgttactgaggcgatcctctcaccttggccttccaaagtgctggaattacaagcatgagccactgtgcctggccctaatttcacattcttttttttttgagatcgagtctcactctgttgcccaggccagagtgcagtgacgcaatcccggctcactgcaacctccgcctcccgtgttcaagcaaattctcctgcctcagcccctcgaggagctgggattacaggtgtgtaccaccatgcctggctaatttttgtgtttttagtagagatggggtttcaccatgttggctaggctggtctcgaaatcctgacctcaaatgatcccccgggctcagcctcccaaaatgctgggattacaggcgtgaaccaccgcacctggcctcatgttcttaaatgtaaaagattcccagtgaagtgttctacataatgttttccttcccccggttctaggttctaggcccattcattttctgtcattttttccccagtgcagccttagtttagaacttgtcccctggtggatcgtgggttttctcctccatctgccactttggcattctaagcttgttctaggctctctcttcttctggagccttcagcctagaaatgtccttatttccagaacagcccccctcctttgccagcctcagtctttattccaggaaatgctcaattctcaacatgcatccttttgatccctccccctccccgccctatagacacttgtaagttccaagcaaactcttagacacatgataaaaccaaggatgtgactcctgctatattcttttttaaaaatgtaattaaatttttaaaaaatctatttatttatttattttgagaccaggttatgagactggttaatttttgtatttttttgtagagacagggtttcaccatgtttcccaggctggtctcaaacccctgggctcgagtgatcctcccaccttggcctcccatagtgctgggattacaggcatgagccaccgcgcctggccccctgctatattctgtgttataccttcatccctagcaggctctgagttctagattttatctgctgactatgtttgttatgtgttgcattaggtatattaatgggtgtcattatgtatgtggggttctggggtgacctggacactaagttattgggttgctcttggctggttctagattataggcttcagaacttagttctagattacttaggcctatgagcggttcttaccccaagccattgaaagcgtggaagcatacgtctattccccaccctgtactgtgtgtagtaaccttctaggttctatgtccagccttgctgtgttttttatttccttctcggtcaatttaaggctctggaacaggctccccaaaacatctgtgttgcatcgtcagagtgggttgctg[146 bp omitted]aaaataattagccgggcgtggcggcacgagcctgtagtcgcagttacttgggaagctgaggcaggagaatcgcttgaacccgggaggcagaggttgcagtgagccgagatcacgccagcgcactccagcctgggcgatagagtgagactccgtctcaaaaaaaaaaaatagagatcatgttggttttttgcctatggctggcttgccctcttagaatcgttttcctgaatctttcctctgagtgctgggattcgcctgcctagattctcagatgcaccacttcaaacacccaaggggacaggaacccagctgcctcctctcccagggcccacggccctcaggccctcctctcctcacagaagtccaaggccccattcccaggctttggacacagtccgcatattgggcggggctgggaattatccacgctcagaccggttatgcgttgcccgcagggagagaaggaaaagaaggaactgagtgaaagtccctcctgctttccgccgggccagctggacccgtcggacctgatgtgtgtggagggagcggttcagggggcctggcttcatctccgccctgcccctggctctagggacccaagtccaggcttcccgccccagaaaccccgccccttccttgtcccccgcccttgggtatagcttcaagagggctggggctggggttggtgggagcgtcccagaactcctgggtcctggaggaggagctgtgcacccaggggcctgggggaggaggagcctgaagcctgggacttctgggtctaagcgaggaagctgagagcccagactgttgtctcttaggggaggagaggggtgcggtctccgactcctgggaatggggaggtgggggctggaggcgcaggctcctggggtctgagagacgaaagggactgggtcttagactcctgtgacctgagggaggcgggagctagttcttggacttctgggtcgtgaagagggtgaagaagtgacaagcatggtcctggccatactggtattttttttgtttttttttgtttgtttgtttgttttgtttttttttgagactgggtctctctatatcgccaagctggagtgcagtggcacgatcttggctcaccgcaacctctgcctcccgggttcaagcgattctcctgcctcagcctcccgagtagctgggactacaggtgcgtgccaccacgcaagctaatttttgtatttttagtagagatggggtttcaccatgttggccaggctgggctcaatctcttgacctcgtgatccaacagcctcagcctcccaaagtgctgggattacatgagtgggccaccttgcccggccgttactgtgttttttttttgaaatggaatctcacactgttgcccaggctggagttcagtggtgctatctcggctcactctaacctccacctcccgggttcaagcgattcttgtgcctcagcctccccagtggctgggactacaggtgcatgccaccatgcccggctaattttttttgtatttttagtagagacgggggtcac[131 bp omitted]cttttcccgaatggagtaggtctttagattcttagggagccggggtccagatttctgggaaattgaaggaggcaggagttgggctggctagtaggtgagaccaaccctgtgacattatacaggtaaccacatcctagtgacctaatcctgggtcccttggccctgtggccttcttaaggcatggttctggtctgggcctcagttttcctacccatgcagtgggttgagggggattctcagtagagccagaataggtagacactgattttctccacattcactcatacgataccagggtcggccagctttggttcctttgagtgggctaggcttaggtttgctgccactgtctgttggagtctgacctcagttttcccaaatcctctcacccaggtagccaggactgttttcctaagagcaatggcacaggcacagtggcatactttgggatgctgaggcaggaggatcccttgagtccaggagtgagacctca[134 bp omitted]cttgtctctactaaaaatacaaaaattagctgggcatggtggcgggttcctgtaatcccagctactcgggaggctgagggaggagaattgcttgaaccgggacccgggaggtggaggctgcagtgagccgagatcgcatcactgcactccagcctgggtgacagatcactccagctaaaaaaaaaaaaaaaaaaaaaaaagaaagtagggaaaggaaaagaaaagaaaagaaaagaaaaaaattagccaggtatgctggtgtgtgcctgtagtcgcagctactcaggaggctgagttgggaggactgctcgagtctgggtcgttcaggctgcagtgggccgtgatcgcgccactgaactccagcctgggtgacagagtgagaccctgttaaaaaaaaataataataataataggcctcagtttcccctggcagcacctggtggccaatctttggtttccccggtggagtgacagggtggcggtgcctgtttccctgtgtcatgatcacagtgcctgggcctcagtttcttctgtgcagtgcttggtttgcccccaactatttcccctacgtggtatccgagtggctgtgcctcagtttctctgttgtgccttgacaaggccggtctgttccttgccctccccgccccgcaggcccgcaccgccgccatgatgtgcgaggtgatgcccaccatcagcgaggatggccggcggggctcggcgctgggcccggacgaggcgggcggggagctggagcgcctcatggtcacgatgctcacggagcgcgagcgcctgctggagacgctgcgcgaggcacaggacgggttggctacagcgcagctgcggctgcgcgagctcggccacgagaaggactcgctgcagcgccagctcagcatcgcgctgccccaggtctgggcgggacaggggcggggcatgagggggcggggcctcggggggaagaaggcggtccggaaggggccgggcttggcgcctggaagggaggagtctgggcgaggcttgccgttaatgggcggggcctgagtggcaagggacagcgggacttagcagggagggcgggaccttcaaacttccagtcccagtgaatgaaggagacagggaaaggattgagccgaatgtccagatcctgccaatgtctggacaggagtttgcagctctgacgaaggagctgaacttatgtcgggagcagctgctggagagggaggaagagattgcagagctgaaggcggaacggaacaacacgcgggtgaggggtgttgagggcggggcctaagtgggggcggggcctcgtggtgttgaagtggggggcggggcctctcagtgttgcagcgtgacctatttttttcccccatctcgcctttctgtcttctcctcttccctgctcccacttcctggctggtctcccactctggtgccactccttcctccctgtctccataacttttctcttttctgtaccaccggttccttgaccccgacctcctctcttttcctgacctgtctcggtgctcctttatatggctccatcttttcctccatgtgtccgccctacctgtcaccctttttctcacatctgccccttttcccttgcctcttttccttgaccccatgccgtgtgcttgcagctgctcctggaacacctggagtgcctggtgtccaggcacgagaggtcactgcgcatgaccgtggtgaagcgccaggcccagtccccgggtggggtctcctcggaggtagaagtgctcaaagctctaaagtctctcttcgagcaccacaaggccctggatgagaaggtatgagaattagaagagcaggggtggagaatggaaacctatagttgactggggctgttctgagtgggagagattctggccgtgattggttggggatgttctgagttggaagaatgttgactgtgattgattgggacaggatacatagactgggacctgactggttgatagcagaaaaataaaccaggatgggggctaacagtggatggggcagattggatagctggttgcggctgcatacccgttatggagacaggagccccaacgctgccctatcggatccgtcccaggggtgttctggaccaggggcaactgtcctaaactggatcttgtctccagctgactgttgccctgccccgatccccaggtccgggagcggctgcggatggcgctggagcgcgtggcagtgctcgaggaggagctggaactgagcaatcaggaggtgtgggtgtggccaagacagggaatttgaatccaaggggaggggctaaggggctgcccacggggcggagccggttgggtgggttccagagagaatctattggggcaggactagggcagacaagctatggggttggactatggagagaaaccagtggggttcctaagtgggcacgcattgcgcagggctacggggagaatctcccagtgagagtgagattaagggtagaaccaggggctggggctcaggctgggactaaggaggaagtgattgaatggggaaaagcggggctaaagcggaaactttgtccaggaggctaaggggaagagtaagggtagacgccctccgtggtggcagctaaggagggatataaggagggagggagcctaagggtaaaccgtggggtaggcatggccccagcacgaccggaggcatctcatatggggccgcctatccccttagagggccaatgccagtgagaactagagctgggggttcagggagcccctgtgctctgattcccctttcacacttccagactctgaaccttcgagaacagctgtctaggcggcggtcagggctggaagagccgggcaaggatggggatgggcaggtgagacatggaagtcccctctccgtgagctccattcaactccctgactttgtgatagtgtttgtaacgtttggtatcatcctcactggccctaagacggctgcacctgtaagagtgtcacagagcttggacctctgattcaggtcacctagcgaacttctgtgacctccttcactgacccccgtggactctgaccagcatgatccttattgatctttgatctactttcagctgattgactttctccttggatttcctctgtgtctccggagacactctgggatcttgtcccctccttccctcactccagactcttgccaatggcctgggtcctggcggggattccaaccggcgcacagcagagctggaggaggccctggagcggcagcgcgccgaggtgtgccagctgcgggagcgcctggcggtgctgtgccgtcagatgagccagctggaggaggagttgggcaccgcgcaccgtgagctgggcaaggcagaggaagccaactccaagctgcagcgcgacctcaaggaggtgaggcccccagggaggcgggctgccctgggtccctcgcctttccgtagagctctccctcgcgcattgctcatgaatggcggaacctcgattcagtccacaggctgggtgactcctctttgagattcagttttcccacctgtgaaaggaaatgtatgattctcatcagagggtgagcctgtggcgcagagtaggcgctccataactgctcgtaattactttgttacctaactttgggttcttctctggtgcctctaaatggattttttttttcttttgtgaggcagagtctggctgtgtcgcccaggctggagtgcagtggcgtgatcttggcttactgccacctctgcctcccgggttcaagagattctcctgcctcagcctcccaagtagctagaactacaggcacctgccaccatgcaccgctaatttttttttttttttttgtatttttagtagagatggggtttcactatgttggccaggctagtcttgaactcttgatccgcccacctcggcctcccaaagtgttgggattacagtagtgagccaccgcacccagcctctttttttttttttttttttttgagatggagtctagctgtgtcgcccaggctggagtgcagtgtcgggatcttggctcactgcaacctctgcctcccaggttcaagcgattctcctgcctcagcctccctagtagctgggactacaggtgtgcaccaccacacctggctaatttttttttttttttttttttgtatcttcagtagaaatggggtttcactatattggccaggctggtctcgaactcctgacctcaagtgatcagctcgcctcggcccaaagtgctgggattacaggtgtgagccactgcgtccagcctctaaatggaatgttttgtgggtatttcacccctttctggcttaggccgctttatcctaatcccagtgaccccagggagctgctgggaaatgtggacctggattcttgaaggcagtggatgagaaagaagagtgagcactaggactagcctgggcaacatagcgagaccccgtcactacttaaaaaaaaaattagccgggcgtggtggtgggt[140 bp omitted]cccgtctccactaaaaatacaaaaaattagccgggcgtg[135 bp omitted]caaaaaaaaaaaaaaaaaaaaagttgaggcataagaatcacttgagcttgggaggtggaagttgcagtaagccgagatccgtaccactgcactccagccagagtgctggttgctcatgcctgtaatcccagcactttgggagaccaaggcaggcacatcacctgaggtcaggagttcaagactagcctggccaacatcgtgaaacccccgtctctactgaaaatacaaaaattagccaggcatggcagcgggtgcctgtaatcccagctacttgagaggttgaggcaggagaatcgtttgaacccaggaggtggaggttgcagtgagccgagatcgcaccactgcactctagcctgggtgacggagcaagactctctctctcaaaaaaaaaaaaaaaaaaaaaaaaaaaaaagaaagagagagagagaaccttcatctgggattttaagcctggatagccgcaggggctattgggaaatgtagccccaccacgtgggctaccagatgagggtccatctcccataagaagttgaagcacttcttttggggttctaggcctctggtaccctggtagctcttgagaggtgttgccttctaggtagaagggatccttatttcccatgagaccccaggacacttgctgtttgattctaagtctgctctatgccagaaattagtgagaaatccaaggcctgggttttgaggagagggctggagtggagacttcacatcccacaggcctcagatcctctgaacctggaggatctgagcctgcagtgtcctagaagctcatgggaggtgtagcatcaccattttaactcgcaggtaggtggcagggacttaagatgggctagtcctgggagctcttagcgggtgtgacaccaccattctgactcccatgtcagggcactttgtttcccagggaacaagggggttccccgtcctctcccccaggggctcgcagtccacggggccctttgctacctccgcaggcgctggcgcagcgggaagatatggaggagcggattacaacactggagaagcgctacctgagcgcccagcgggaggccacgtctctgcacgacgccaacgacaaactggagaacgagttagctagcaaggagtcgttgtatcggcaggtgggggcgcggccgggaggggcgatgggggcggtgccggggcccaagtgacccagcccgtcccctccccctgcctctccctcccccagagtgaagagaagagccgtcagctggccgagtggttggacgacgccaagcagaagctgcagcagacgctgcagaaagcggagaccttgcccgagatagaggcgcagctggcgcagcgcgtggcggcgctcaacaaggtgcggggaggactcgggtcggggccttgcgtggggaaggggtggggcctagaggaggcggggccgtgaatctggaggggtaggagcgaggtcagaaccccggatttgggggaaagggtggggcctaggggctgggaaagggacaggacttggaatggggagggcctggaggtttgcgcgggggacggatgggagcggggttctctagcctggactgaaaggaccggtggcctggaacctgagagggaaggaacaggtcctgaaaaagtggactaggcgcaggggcggggcctgactcaaaggtgcaggggaggagcctggcgctgtgggggcggagcctggcgctcagccttggaggaggtggggctgggagcctgactgatcctggaagggtaagtcacacgccatgggttccatctcctaggccgaggaacgtcatgggaattttgaggagcggcttcggcagctggaggcccagctggaagagaagaatcaagagctgcagcgggtgagggggcggaagactgcacagagggtggggcttcgaggctggggcggagcttaataaggaggctgggctgggcccgggggtggggcttagaggaagggccgtggtctgggcagggtgggcttaacaacccgccccgctctgctttgcgcaggcccggcagcgggagaagatgaacgatgaccacaataagcggctgtccgagacggtggacaagctgctgagcgagtccaacgagcgcttacagcttcacctcaaggagcgcatgggggcgctggaggagaaggtgcgccccccatacaggactgcgggacgcggaattccgggactacctcttgctggaatcctggggccccaggcctttccctcagatctgttatcggaggcctccctaaaccccggcatcctgagttgggcagccttctctgctctattgcccagaccgctttttcacctattctagacgttccaagagccgaattctggggcacccatgcctcgagtccttgacttttcccaaagcctccaaccccatgggtctccaaaccctgaaccctctgagattgcacaggacgtcgcatcccggggcttctctccccagaaacatcgttgcccctgctcccccgaaactcaccacttgtgtccatctcattcctcctgggtcccctcaggcctgtctgtgtgcactgggagctgcctgcagccccacgggcgtggcccctcaggcctcactccctcacttcacctctgtctccacagaactccctgagcgaggagatagccaacatgaagaagcttcaggatgagttgctgctaaacaaggtagggggccctgaggggacaggaggaggatgttggggcagtggttgctgaggctagggtctgcaagtctggcaggggctgttcctcctgggcggagcagattctaacccgacacctccaacaccggcccccaggagcagctcttggccgaaatggagcggatgcagatggagatcgaccagctgcgggggaggccaccatcctcctactccaggtgacagcagcccttctgccctgcccccaccatggagccccgttggccaagcgccaagctcctcccttctgatccccacttcctgtcctcctgagacttctgacccctctgtttttgttttttgtttgtttgtttgtttgttttgagacagagtctcactctgtcgcccaggctggaatgcagtggcacgattccggctcactgcaacctccacctcctgagttcaagcgattctcgtgcctcagcctcccaagtagctgggactacaggcgtgcaccaccacagccggctaatttttgtagttttagtagacacggggttttg[131 bp omitted]atttattttttctttcttttgagacagagtctcactctgctgcctgggctagagtgcagtggcatgatctcagctcactgcaacctccgcctccccggttcaagtgattctcctgcctcagcctctagagtggcagggattacaggagcccaccaccacatccagctaattttttttatttttagtagagacagggcttcaccaggttggcctggtctcaaactcctgacctcaagttatctgcccacctcagcctcccaaagtgctgggattgcaggcttgagccaccaggcctggccccttgaccttgacttcaggacccctggccctaggtctgtctctgtgacccttacctctgtgctcttttcctgaccccttggtctctgactgctttcctcatgcccacaggtctctccctggcagtgccctggagctccgttactctcaggcacccactttaccttctggtgcccacctggatccctatgtggctggcagtggtcgggcaggcaagaggggccgctggtcaggggtcaaggaggagccctccaaggtcagcagctgcctctgggtcctggactgagcagggcttgggcgggcagctgtaggaagtggaactaaatctgtggggctccgggaggaagctgggttgagaggcaggatctcttggactcatccactcaccctttcttctctccttccctgcaaccctcttgcctggatgtctcctcctgtggatgtcctgccacctggtgagaacctgagagtaatcatgggacagggaggggtgtgtagaatcccagagtaggtggggttaggtgaggaacaggagccagctgagtcatgggaatcaggggcgggggtggagtcatgggtgtgggcgtggcttggagaggatttggggagggatcaagaacagggacctgtcaagagaggaagttggaggccgggcagggtggcccatgcctgtaatcccaacacttgctggcgccgaggcaggcagatcacttgaggtcaggagttcgacagcagccttgccaaaatggcatcgctactaaaaatgcaaaaattagccgggcgtggtagcgggcgcctgtaatcccagctactcaggagactgaggcagaagaatcgttcgaacctgggaggcgtaacccgagattgcgccactgcactccagcctgggcgacagaatgagactctgtctcaagaaaaaataaataaaataaaaaaaataaagctgggctgggaaaagcatcagtgaggtcgggcaagtcaggatcatgagccaagacccagcgccaacctcggcccccagccacctaatgtccctctgtccccacacagggataggattgggagcggtctgcccctgcgggctccataccacccccattccctggggaactggacggctccgatgaggaggaggcagaggggatgtttggggccgagctgctgtcccccagtgggcaggctgacgtgcagacgctggccatcatgcttcaggagcagctggaggccatcaacaaggagatcaagtgagccctggccccgccccggcctgccctgccctgccggagctgactccacagcccttctggctctggaggcctgaaagcctgagtccgtctcctcttacaccatccacaaggaattcttccagcccaacactcactccgctgtccaggcatcccctaggatacactcagaagtcttctatgtgctacctacacatataccccccagccagtactcaccattccccaacacaccaaagcctgcatccccaaatagcccagttcctcttgatgcatcaagaatcttccattacgccatcgattttgtggtttcacataaccagtgcccagagtctcccactaccctaggaatctcaagacaacacaaggttcccaacctcaaacaccaag[136 bp omitted]ggctaacatggtgaaaacctgtctctactaaaaatgcaaaaaattagccaggcatggtggcaggcgcccgtagtcccagctactcaggaggctgaggcaggagaatggcatgaacccgggaggcggagcttgcagtgagccgagatagtgccatgcactccagcctgggctacagagcgagactccgtgtcaaaaaaaaaaaaaaaaaaaaaaaaaaaaaagtccccaacttattaagaagcccccagtgatgtaaagtctaccctgattcaccagcaatggccatattcagcaattctcttataatgtactccccatgagccttcggcaaatataccatgaccaccactttccataccaaatgagtccatgcccttcccagatcctagattggcctgagtccctgatctcacaatgctcctattatgaccttgctcttacaggccaccttgaacttgaccttttgtccatagtaatcccttcatgattttccaaaccccttgactatcatcagggccaccctgatacaaaccccaatcaccttgatagccctaatcctgcaatgacttcctgagactctcaggaccccttgactctccttgagcctggaaggccttcagaaacccaccaaagtcctctgacgtcattgcaccgtccccagaattcccattgccccaccaggcctttctggcccattgtgctcccagattccctctcccgctgtctgctgcggcccctcacccagtttcccctatttccctcctcaggctgatccaagaggagaaggagacaacagaacagagggcagaggagctggagagtcgggtgtccagctctggcttggactcgttgggccgctaccgcagcagctgctccctgcccccctccctcaccacctctacccttgccagcccctcccctcccagctctggccactcaacaccccgcctggcaccccctagccctgcccgtgagggcaccgacaaggctgtgagtgctctgaagtctccccagcctagtagggggatggggagaggtcagaggcagggctccccagtgtacagcaacaataacccctcacaccagtggttttccaaagcaacctcagctttccctaaaggttcaaactcaaagggcaaaggggaggctgagtcactgggatcttgaaccctaactttcactttagtcagatctggtctactttt[134 bp omitted]ctggccaacatggtgaaacccccacctctactaaaaatacaaaaattagcctggcctggtggcacgtgcctgtaattccagttactcgggaggctgatgcaggagaatcaattgaacccaagaggcagagtttgcagtgagttgaaattgtgccactgcactccaacctgggagacagagtgaaactgtgtctcaaaaaaaaaaaaagtttctgtgacaacatgcattggagaactacaaattagatcctcagaattgacctttgagggagacaaagagatattggccctattttactcccttaaattcagctttcctgcttccagaacctgtaactcattagctttctttgaggcctgaccaacatggtgaaaccccatctctactaaaaatacaaaattatccgtgtatggtggtgtgggcctgtagtcccagcttcttgggaggctgaggctaaagaatcacttaaacccgggaggcagaggttgcagtgagctgagatcatgccactgcactccagcctggcgacagagctagactctgtctcaaaaaaaaaaaaaaaattacccgggcatggtggcacatgcctttaatctcagctacttgggaggctgaggcaggagaatctcttgaacctgggaggcagaggttgcagtgagccgagattgtgccattgcactccagcctgggccacaagagtgaaactccatctcaaaaaaaaaaaaaaaaaaaagtttctgcaactcaccctgacttgagctagactaccttcgtatactgtgttctaaaccagggtcaccccacacacaccttagtagacatctcagttaataaggagcccccgacatgactctttgaactcaatccagcatctgtgccctctgtcctcagaatcatgtccctaaggaggaagctggagctccacgaggggaggggccggccatcccaggagacaccccaccacccactccccgctctgcccgtcttgagagaatgacccaggccttggcactgcaggcggggtccctggaagatgggggacccccacggggaaggtcagcagggacaagggatagggacagggagaagctggcttgggaagatgagaagggggtggacaaggacttgggaggagagggggcatctcagcaagcatatgctctcattctctcctgctttcccagtgagggcaccccagattctctgcacaaagcccccaagaagaagagcatcaagtcatccataggccgtctctttggcaagaaagagaagggacgaatgggacccccaggccgggacagctcttctctgggtgagtacctcactctaacccttccctcctttgttccttcctcccttcctccctccctttctttcttctttgtatgttcatttgacatccattcatgtcttcattcatttggtgatttatttagaatttggaaggaacacagcttgccaaggtaggcgggaggaggagggaaaaggaaagggcactctgggacctgcttgggtgactgggtaggtaaaggaatttatttcctttacttatttttttgttgttttttggtttttgttgttgttgttttgagatggagtttcactctgtcacccaggctggagtgcagtggcaacgatcttggctcactggaacctctacctcctgggttcaagcgattctcctgcctcggcctcttgagcagctgggactataggcgcccgccactatgcctggctaatttttttgtatttttagtagagatagggtttcctcatgttggccaggctggtcttgaactcctgacctcagatgatccacccacctcggcctcccaaagtgctgggattacagactcatttaccttttttttttttttttttttttttttttgtttggagacggagtcttgctctgtcgcccaggctggagtgcagtggtgctatctcggctcactgcaagctccgcctcccaggttcatgccattctcctgcctcagcctccccagtagctgggactacaggcgcccaccaccacgcccggctaactttttgtattttcagtagagatggggtttcaccgtgttagccaggatggtcttgatctcctgaccttgtgatctgcctgcctcagcctcccaaagtgctgggattacaggtgtgagccaccgtgcccagccacctattttttaaacagaggaagagggtggggcatcctcaaagcagggcaccttcctgtggtgtgctggagcccgctggcactggctcaggagatccgctatttcaggaattggctgacatcacactggtagcttgaaattggccatggtgggattatttacaccatggaaatgggcaaatgctacaaatcagggattcccttctgcctccccaaggagccggttgttaggcatttaccagcatacaactgccaccttaccaagggcatcccagtgcatccagccgtattttggggatgactccaattcatgggcgcttgtctgcctttatcacttcctcgatgtgccctcactcactactccctcagggcctctgcctttccggcattttcctcatcacctccagcatgaaagattctgcctcccccttgagattttccaaatttcgacccctccctgcctccagctggaacaccctcagatgagacactggccactgaccctctggggctagccaagctgacaggcccaggagacaaggaccgaaggaacaagaggaagtgagtgtgtgtgagtgtgagcgtgtgtgtgtgtatgtgaatgtgagagtgtgtgagggtgtgtgtgtgcgtgtatgtgtgtgtatgagtgtgtgtgtgtgtgagagggtgtgtgagtgtgtgtgtgcagcggtggtggtggtgaacagaaatgggaattcaatgctgggaggaggtgtccgtgatcctgaacttgcttgcctggaaacccaggagctcctagagtttttattttttctttctttttttaaaaattttttttgtattttttacatttatattatattttttgtttcttttgtttttcttattttgttctctcttttgataggggttggggggagaggatttacagattcacatgtattttttgaccttctgccgtgttttgtacattcataaaagctgcgtgtgcgtatgtgcatgtgtgtgtgtgtgtatgtgtgctgatgggggccatccacagagcagggggtctccatccctgacagcttctatcctggccccttcacccttacaggcatgaactcctggaggaggcctgccgccagggcctaccttttgctgcctgggacgggcccaccgtggtgtcctggctggaggtactggggcccagaaatgccctgactgttggtccccaacccctctgacagccccactggtaggggctgcctggtcctcctggcgcaccctgcttctagcccagaggtgggggtggccatgggcctggcaggtgaggacccaggagggctcgggcttcctgttcacctaaacagtttctttctccttctccttctgcccctgccactctggccttgcccacctgggtcatggtctcctgtcgttctctctactctctctttctggattctctgtctctatttttcggcaccattcccatctctgaccacgcttttgtcattccccatatttctcctcatgtctccgatcgccctgccgatgtctccctgtctccggcttcctgtctctccccaccctctatttctctctctctatttctttctctctctctctctttctctctccctctccctcttcccccacccgccccccgccccccgtttctctccctatttgtctccctcggactctccctcatctcgtccacgtctcttttccttgtcctgtttcttctccttgcgaactttcccacgtctctgtttcgctccccacccccttgcctttccccacctccctgttcccccatctctccgattttctcctcctctgtccctctgtcccctctgtccctctgtccctccgctgcagctgtgggtgggcatgcctgcctggtatgtggccgcctgccgggccaatgtcaagagcggtgccatcatggccaacctgtcagacacggagatccagcgcgagatcggcatcagcaacccgctgcaccgactcaagctacgcctcgccatccaggagatggtctcgctcacctcgccctcagcccccgcctcctcccgcactgtgagtgtccggcggccaattccagccttcgcttcctcagagccccgcctcttgccctcagtctagccaatcctgggcctgctcactcccctgtcccacgaccctgcttctcattggcttttacccccctcagcctcccctccactcctaacttggcctgtggtccgtccctgtggtactccaggaggggcccaggccacctccttccctgactctctccctctcctcggcatttgctgtcccactcaaatgtcaccacctctaagaagctttctttgtcagctaaacgagtttccccatcattccggcatatcagcaccttctaattttccccatagcatttattgccttctaattattttatcttttctttcctttttttttggagacagagtttcgctcttgttgtccaggctggagtgcaatggcgctatctccgctcactgcaacccctgcctcccgggttcaagccattctcctgtctcagcctcctgagtagctgggattacaggcgcccgccaccacgcccagttaatttttgtatttttagtagagacagggttttgacacgttggccagactggtcttgaactcccgacctcaggtgatccgcccgcctcggcctcccaaagtgttgagattacaggcgtgagcccctacgcctggccctcgttccaacttttgattacgagacatttcaaacatacagaaaatcatgtgtacccagttcagcgattctcaaacttttgctgtacttgctctgttgtgtgtgtggggtggaggcggggagtggggagtacaggttgagtgtcccttacttgaaatacgtgggaccagaagtgtttagaatttctgattttaaaaagttttttttgaatatttgcatataaatgaaatatcttggggatgggagccaagcctaaacatgaaattcatttatgtttcatatgcatctcatacacatgcctaaaaagaattttatacaatattttattttttatttttattttattttttcgagatgggagtcttgctttgtcgccaaggctggagtgcaatggtgcgacctcgactcactgcaacctctgcctcctgggtgcaagcaattccaatcctctgcctcaaccttccgagtagctgggattataggcgcccaccaccacgccctgctaatttttgtattcttagtagagatggggtttcacca[138 bp omitted]actgcattttgtttgtgacttgtcacatgaggtcaggtgggggattttcctcttgtggcttcgtgtcagcacgtaagtttagggccaagcactgtggctcacacctgtaattccagcattttgggaggctttggatggccgatctcttgaacccgggagttcgagaccagcctgggcaacatggcaaaaccccatctctactaaaaatacaaaaattagtcgggtgtggtggcgtatacctgtagtcctagctactcaggaggctgaggtgggaggatcctttgagcccaggaggtcgaggctgcagtgagctgtgattgtcccactgtactgcagcctgggtgacagagaaagagtgcatccaaaaaaaaaaaagtttagaattttggagcattttggattttggattttcaggttggggatgctcagagacctgtacttgaatgtaattggagaaagtcataacatcttagcccccaaaattactttagtgggtctttttcttccttgtaaacaccacatcctttatcacacctaagggcattcacattgttgttaatttctttttcttttcttttctttcttttttttttttttttgagatggagtttcactctgtcgcccaggctggagtgcagtggtgcgatcttggctcactgcaacctccgtctccctggttcaagtgattctcctgcctcagcctcctgagtagctgggattaaaggcacacgccaccatgcccagctaatttttgtatttttagtagagatagggtttcaccaacgttggccaggctggtcttgaactcctgacctcaggtgatccacccgcctctgcctcccgaagtgctagaccactctcagcctaatttttgtatttttagtagagatggggtttctccaggttggccaggctagtcttcaatctccaaaagtgatgtgcccgcctcagcctcccaaagtgctggcactacaggtgtgagccaccacgcctggccacagttgttaatttcatttactattcactctgtattcaaatttccccaacatacttaaaatatgttcattgtttctcccccactaggacgaaaagtgtctgtcgtgtcccttgccatatcccacaccctatgacggtgactggtgcctgacactcaccagaagtacataaatgtttttatccttgtatggattcctaactcgtgaggttgttgggagcagaagctcaataaatgtgaaccccccccgccatactccctaaacatttgcaccatggctgtgtctgtcccccacttctgaatcctcattctgtacctctgtgtgaggtcagcgaggtgacgtcatttgcacagggccacacagcaaaatgcatggcagggtcccaattccaacctgaatttgttcaactccaaagtcacattgcctggtacatggcaggtgccctataataagaatcattccttttctctgttactgcttgccccagaaagcaggagggacataaacgtgtggcccagggccttcaggaggacaccctccttcctctcccccacgcgaagccctctcccaccatccattaacactccctgcccctcagtccacaggaaacgtgtggatgacacacgaggagatggagtcccttacggccacgaccaagcccgtgagtgccccctgccggccgccttgggggtggcactaaccttctttgggggtgggggcggggaccgagtctgtggccatccctaagtccgctccttgcgtcctcctctgcctgccccttaactcaccccttctctcccctcttcctactaacgggtcaggagaccaaggagatcagctgggagcaggtagggggcgcggggcggggcgtgagcgcatgaacaggctgtgcacgacgcatggatgcccctcctccgagccctgcccctgccttcaccagaacatgccatcatccccatgggggggcgctgcgccaagcttggctctggactgttccattatggcttggcggtggggagggtagaggggatgcgatgtggaagcccagactgttgcatagtcagccttatgcatggaccatttcatcatcgtgggttgtgggggctctaaggggcttcaattctgtagctcaggagagactgagcagccggtgtccctatagtggagggggcgggggctacagtggactgctcagtgtaccagggccaaggaggacacactggctgtggtggtggtgaggcagccaggctgaatgagaagttggggaggaggagctacactttgttctcaagaaacaagaggcggccgggcgcagtggctcacgcctgtaattccagcactttaggaggctgaggtgggcagatcacctgaggtcaggagtttgagaccagtctggccaacatggtgaaaccctgtgtctactaaaaatacaaaaattagccgggtgcagtggctagcgtatgtaatcccagctacttgggaggctgaggcaggagaatcgcttgaacccaggaggtagaggttgcactgagccgagattgcaccattgtactccagcctgggtgatagagccagattccatctcataaaaaccaaacaaataaactaacaaaaaaacccaagaggcatgaactcactgtccacggaggaattatgtttgactgtggtcatagatcacatatttccagccagggggaggcgtggattttgtgctgatgctgaaaggagtgagggacttgggactcatctggaatattgtcctgggccagatataacattagacaagtattttcaggacattgcaagagtgatggccctttcttagtgggagagctgccttgaaagagtccattgtcctgacttgggggtttagtgacgttggactgcagtgagacagagttaaagcagtgcttccccaaatttaatgtgtagtggggtggcacacacctgtagtctcagctacttggaagactgaggcaggaggaccgcttgagcccacgaagctgaggtcaacctgggcaacatagtaagaccctgtctctaaaaaataaacaaatacagccaggcgcggtggctcatgcctgtaatcccagcacgttgggaggctgaggtgggcggatcccttgaggtcaggagtttgagaccagcctggccaacatggtgaaacgccgtctctactaaaaaatacaaaaattagccgggcgtggtggctcgtacctgtaatcccagctactcgaaggctgaggcaagagaattgcttgaacctgggatggggaggttgcagtgagacgagatcgtgccaccgcgctccagcctgggtgacatagcagactctttcagaaagagagagagagagagagagagagaaagagagaaagaaagaaatttaaaaataaatataatgtatatttcgaatcacctgagggtcttgtgaaaatgccgataccgacttcagtaggtctggagtaaggtctgagattctgcaattccagcaagtccacaggtgatggtgacgctctaggtctcaggacaactgtttgagtagccaagagtatatgctgtcatgaagggctaggagacaactctggattggtccattatcctgagcagagattggtcattgtcctaccatggggtgggaaaaaaccttggattgggaggttggactgtacccctctcatgcacagtgggaaggggccagagggcctgactcttccctcacctgcccatggccccagatcctggcatatggcgacatgaaccacgagtgggtggggaacgactggctgcccagcctggggctgccccaataccgcagctacttcatggagtcgctggtggacgctcgaatgttagatcaccttaacaagaaggagctccggggccaactcaagatggtggacagctttcacaggtgggggctgcctggccagtggggacagtccaaagggaagccccaccccagagagtctttggccaataggattggccatgggagattcccaggcttatcttggcccttttagcctgagttctcaggaaatcctgactctgtgctcctttcaccaatgagatggtccacaggaaaagttcagatcctgaaatggcttggctagttaaccctggaccccttccaggctggccagtaggaagtgcctattattgaaaatgcctcacctcctgagggggtcaacagtcaatagaacttatcagctccccaccctttccaagaagagcgcagccagtggggagggacccgtaggagcagcagtctaggggactggaaagctcatccgtgactccacttcccctgctgctcagggtgagtctacattatgggattatgtgcctgaaacggctcaactatgaccggaaggacctggagcggaggcgggaagaaagtcagacccagatccgaggtgagtagagcctaagggtccctttgggagccaggtggagggcgtggagctggatggggaggagagggggtagggggagaccggagaagcaaattggcaccataaccgtgggggtggagccagcgtggggggcgtggcccgaagagaccaaatggaggtggaggtatgggctaaactgaactctccaggccacgggaggggcacggctgagggtcccttccgtccccagacgtgatggtgtggtccaatgagcgggtcatgggttgggtgtccgggctgggcctgaaggaatttgccacgaacctcacggagagcggggtacacggggcactgctcgccctggacgagaccttcgactactccgacctggccttgctcctgcagatccccacgcagaatgcacaggtgagctgccgctgggcccggagcatgctgggcgtccccacctcgcagactgcacgctccaaccgccccctccacctcctctttccaggcccggcagcttctggagaaggaattcagcaaccttatctccttaggcacagacaggcggctggacgaggtgggcgcggcaacagctcagagggctctgctcccagcggctcctcgagaggctgagctgagggggcggggcctgactattaatggtcacggttggaggcggggccaggagaggggcggggttaaaggagaggtgagacccggagaggggtggagtcaaaggaaggggcggagtcagacaaggcaggagtccctcaccggctgtccggctcctatacctaggacagcgccaagtctttcagccgctccccatcctggcggaagatgttccgggagaaggacctccgaggcgtaactcccgactcagctgagatgttgccccccaactttcgttcggctgcagcgggagccctgggctctccggggctccctctccgcaagctgcagccagaaggtggggggctcccaaatgcgacagcccttcctcgcttccctagggtggggcatggaccacctcagtagtccgggttctggaatggcctagtcctttctcgcccacccctgaggaatggactgctccaacgttccggactcccccgtcaggatgaaatggataaatcccactcccccttcccagggcgggagtgaactcgcccaatgcgagtttgagtccttggctgcggggaagggagggaaacccatgtggagcccggcgatcgttgtgacatcgggaagggaagtccaaagggaggaatcctggagaggaacagggaggagggtgctccaggctgaaccgctgctcgctctccctccaggccagacttctgggagttcccgggcagacggcgtttcggtccggacctattcctgctagtgcaggcctccaggtgaggaccgtgctgggcgaccttgggggtgcggggcggcacggtggatcttcactgctccacgcgctgcccggcgtcatgcaggtgacctcactcggacggaagaatcttcccgaggctgggctgttccctctcctgcccggactgtggcctcgccggggagagcgggcgggggagctcgcgccgaggactggaccatctgtacagaccagcgggagtgcgcgcgcccgcctcgcacagggccggggcctggaccaaaccacatgaactggactgagagggggaagaagcggggaggaagaaatcccgccccaaacgtccgctttccttttctctactttgtaatttattgatcagtttctgttgggagacgggtgtcctttacccgcgggaagggggcggggcttccctcccgggccgcatgcggggagaggctgctccctcccctttttcctgcccagtcgcggggcccaagtcttccttcttcgtccgaaaggaggggaggggggactcgctgctacaagcctcgccccctgtgccactcagctccgccccgccgcgtccggtcgccggtcccccgggtcatctgcgggcgggttcccctctccctcccccgtgtctcgtgtccccggggcctcaccgccccccgtgctgtggccgtgtccgtgccccgggggtagggggcgcagaatggcgcttccccttctcctctggctccggggtttgcatgggagaatcctctttccacgatgccgctgggcgacgtggcgtgggggcagggggacggtgggggagccctcgcccccgactctcggtcggcctccccgccccaggcgtcactcagtgatcacgggtaaagagaactgtttcaaaaagcttccttgttgactgattttttttttgcggggggggggggggctgttcaaccaaccacctcgagccaggagtccaggcccctcatccctcaagtctaggtccaggtctctagaccctacccgcattccccgatgccctgagattcccagaccccacgtctgacaatgaggtttcggggagcacgtttattcggagaaataaatatagctcgtggaaaggggttggaaggcagggggaggtacacctgcgtcgcagtcgagcgactgggtcagggttccggcgtttccagcatgtctgccagggccctggagacgagaacgccagaagttagacagctggtgttcaaagcccaccccaggacgcttagagatcattaacctgcccatttcatggacggggaaatggagtcccagagtcatctgataactcatagcgagacaagcacttctctaaacggggcttttacacgctccccttttacacacttactgataaagggacgaggagaaatagtcaacgtagcttcctgtgggacagcagagaaaagaggcttgaggggtactgcacgagcaaaattaggcagccactcagtatagcgtgcgagattagtgctagctccacctccttttccctaattccttcttccaactgaatcccttctaccggacccctttttcgttctgggtgattccgttctccagtagccccgccccttcgattcctacttgagttggcctcgcccattaggctctaagcccgcatctcaaccctccactcatttctgtcccttggctccagcaactccacctggtgttcctcgagccaggccccggcccacgtgctcagagccttggccacgcctcccctcttagccccgccccaccagcctaccgggccaggctccgcccccaccaggattcaccacgctgggcccggcaccttcctcaggtttttccagggccccgcccatgctcacctggagcgcagaccgtttcgcagaccagcgggcagagatagcagaactgacagtgctggaggcggggacggggagagagagtgagcgtggggcgtggccgggggcggagttaggatggggccgggaccagacccggaccagaggctaggtctaggttaaggttggagtcaggatcgcttgtggagtcaaggttgcatcaggggtaaggggttgggtcagaggccaggatttagggctgggggtcctcagagggtcccggtgcatcctgaggcccagtggagccttgagtgtgaggtgaggtctcacctggcactggtcgcagtgctcacccatgttctcctcatcacagtgacagctctcacattcagtgcatcgctggggaccgggggagcctggttagatggaaactctaacgccacttgggaggtacccgcccctggcccacccctgcaccctggacgcttccccagactctaccctctttatctctaacactgagctctgtatctgccccccaaaccagcctcccctcccctcccctgcccctg[131 bp omitted]cctcggcctcctgagtagctgggattacaggtgcgtgccacca[134 bp omitted]cacacccggccctgcccctggttttctatctcagggcgaccccatgtctccctgtcagggtgggctcaggtgctctctccacccgctctctgcctattctccccctagcctatcagcccctgtgccatccctccttcccccgactctctttgccacagacccctgtctctgtccccacaccccaagatgcagcttgggtcttgtcctctccttcctggaccactgccccagcctcccagccttcagtctgtcctcacctcacatgcctgcagaaggatctcttttctttcagaactgaccctggcctgcccttgctctgagccctcccacagcaccaccccagggcccctgggacagattctggggacaccttggtgggtggatctgggctggggacatacattgcagaaggagcagtagccacacagggaccctggctggtagttcccatactcctgagcatcctgtggacctgcggggacaggagggcagcagtgacccaggctgactcggttccttcccacccacaccagcccaggccacttacctgtgtcctcaccgctttcctcctcgctggaggcacctccagcctcctctctcctgtccagtgggttggggatgatggtgaagcggggctcatcttcctccagcccctcctcctcctcctcttcctcctcgctgtggtctgggctcagtggggccccaacctcagccctctcttccctcctctcctcgtcttcttcctcctcctcctcctccttgtcttcctcttcttcctcctcctggttcaggctgaggccatgaccttcctcctcatcctcctcatcttcctggtcccggctgccatgatgggtgcctttctctccctgctctgaactttcatcgtcttcctcatgggagccggggtcctcttccttctccttttcctcctcagaatcatccttcctcaaatggcttctatccttgaccactgtgtgtcctggggggtgatggctcatctctttgatggaccctctttgaccatggccagtttcttcatcttggtggctttgcctgtggctgggggcctggtggccaagctcagcagagacctcctcatcttcctccctggggactctgtggtggtgatggtgagggacttctgttttatactcatcttggaagtcctcttcatcactcttgtggcctcgaggttggtggcttgcaacatagtggccgaactggactgtgatctcctcttcttcctcttcctcatctacaaggccatggtggacatgttggggaccctggtgccaacgttcagtggacacatcctcatcttcttcctcgtctctgtggccttggtgcctgtggtcagggacatgatggtggtgttcacctgagacagcctcaacctcttcctttctgtggtcttggtgcctgtgggcctggtgtccatactcagtggagacatcatcatcatcattgtcatcttcttcatggcttcggtgcctgtggctggggtcgcgatgatggtgtccatctgagacatcttcatcctcttcaatcccgtggccttggtgcctgtgagcctggtgtctatattcaatggagacatcatcatcatcatcatcatcatcatcatcatcatcatcatcgtcatcttcttcatggccttggtgcctgtggctggggccatgatgatggtgtccatctgagacatcctcatcctcttcactcccatggcctcggtgcctgtgggcctggtgtccatactcagtggaggcctcctcttcctcctcctcctcctcctcctcctcttctccttcatcatcttccccatcatggcctcggtgtccatgcctgaggatatgatggtgatgctcactggacacaacttcatcctcatcctcgtcttgatggctgtggctcctgtggctggggaggtggtgcctgtgctcagctgagtcttccgtgtcttcactcccgtggcctctgtgcccacgggcctgcccaccatgctctgcaaagacctcctcacctgagacaccctcatctccgactttgtggtcttgggacctgtggcctgggagtaggtgcccatattccttggagacatcttcatcctccttttcacggtctgggtggctccagaaatgatgcccattctctgtggaaacatccttgttctcatctggatggtctctagggctgtggaggtggtggcgaagctctgctgatgcctcctcggagagcccggcgactccagtgctgttgttccggtttctgaagcctagcccatcccctctgagctgctgggtcatggccggggggaggagcaggctggccaccccagcccagaggacagaagcgtgcagccatggcctatggtggcccatggggacggacaggcagcactggctccagctgcctctgcggcaatgtggacaaacgttggggtctttgtccctttggggttggtctctttttttctctgtgtctctcctttgtcctttcggtctctgtccaccttcctctggtccttgctgcctggctctggacacccctctgaggctgtctccggagccccctgacccccctctggggccctccctccccattccccagccaatagggtccttcccctcccctctctccagctaaatttactctcagccctgagttattctgggtcagtccccgcctgcctgcctcctgctcctcctcctcccagctggggaggggaccagtgaggggtctctccctggccaggagacggtggccaagggacttgactttgaactaccaacaagctcacgtttggcagctgcaaagacaaaggctagacttttagcaggtttttgggggagcctggggcacctgggggaggcagaagagacttatcagaggggagagactcctgggacggaaggactgggggttcgattgcggggtgtttccagctggaatgatacgtgctggtgagagagtgatgtcagtattgaggccctagaatggggggaaaggaacatggcccccaacacacgtgcccatgacctcctgtccctggaactcagatctgggggcagggactgggctaggccagggctataaatacagctgggaggggtagggggactcaggttacggaggccacagctgtccccatcacagagggctggcaggagacaagtggccttgcccgtctctgtgtgtcagtatttcctactcctcacccttcatgactgcccccactagggtctcctttcctgttcacgggtcctcctctctcttcaattctgtcatctgctctctcagggtccctgtccctcctccatgggattgcctctccctctcactctgggcttctgtcccactcttatcttagtgtcagtcctcccccaagtctgtgtccctctctctcccctaaatctctggcccctcctttctgagttcctgcccttcccccaattctttggtttttgcatccccctctgccccttgcctcagtcaaggtgtctcctccccatctctggcatccacctctctgggtctctgtccccactctctctcagagtctctgtccccctctgtctcagagtctctgtccacctctccctgggtctctgtccccctctctctgggtctctgtccccctctccctgggtctctgtccccctctctctgtggatctctgtccccctctctctgggtctctgttcccctctctctgtgggtctctgtccccctctctctgtggatctctgtccccctctctctgggtctctgttcccctctctctgtgggtctctgtccccctctctctctgggtctctgttcccctctctctgggtctctgtccccctctctcagggtctctgtccccctctgtctcagagtctctgtccccctctctctgggtctctgtcccctctccctgggtctctgtacccctctccgtgggtctctgtcccctctccctgggtctctgtccccccatccctgggtctctgtccccccctctctgggtctctgtccccctctctctgggtctctgtcctcctctctctctgggtctctgttcccctctctctgggtctctgtccccctctctctgggtctctgtccccgtctctctgggtctctgtccccctctctctgggtctctgtcctcctctctctctgggtctctgttcccctctctctgggtctctgtccccctctctctgggtctctgtccccgtctctctgggtctctgtccccctctctctgggtctctgtccccctctctctgggtctctgtcccctctccctgggtctctgtccccctctccgtgggtctctgtcccctctccctgggtctctgtccccccctccctgggtctctgtccccccctctctgggtctctgtccccccctctctgggtctctgtcctcctctccctgggtctctgtccccctctctctgtgggtctctgtcccactctctctgggtctctgtcccactctctctgggtctctgtcccctctccctgggtctctgtccccctctctctgtgggtctctgtccccctctctctctgtctatccctgggtccctgctgccccaccttctgattctctgtcccctaagtctttgtctccccctctttgggttaaattgtcccctccctgtctggcatcctcctttctgagtctgttccctctccgccactggcccccaactccttctgttcccatctcgcgcttgcccttggagtctcccctgtgtgtctctctccccccggcccggacctctgcaccccccaggtcgctgtccctctgtccccttatcgcggcctgggacccgccctctccccgcctcccgctttggcgtctccaagactccccgccccccagacctcgccccgccccaggctaggctggaaagtggaggatccggtttgctctgggcgggtctggaagcagagccggcggagggagcgccggggccctgggctgcaggaggttgcggcggccgcggcagcatggtggtgccggagaaggagcaggtgagcgccggaccagggtctgcgggagcgcggagctggggacctcgcctccaggctcccagagaggagggcgctggacacccagattcctgggtcagacggaggagggggatgggagggtccaggttccagggtccagggcatgggggtcgagactcctgagtctggagcgggagggcgctgggggcccggactcctgtgtccgtggggagcgcacggggtgggtggctctgtgtcccataggacagaactgggtgccctctcaccccacttccacccctacatttgttcctgtccccagagctggatccccaagatcttcaagaagaagacctgcacgacgttcatagttgactccacagatccggggtgaggagttcgcccctggactgaccccagagggtccgcggcccgctgaccccgcccgcggatggtcacgccccagccctgctccttccccattcctggactcggggaccttcccaagggcgttccttgccgacgctctccctctaggagcgtttgggtctgtgtagacacccctcattccccattcgccattctcccgctcagggtcagtgtagacgctccagggctcggttctgcttctttcctccccgatgtctcttctatgtgcttctgtctcttcgtgtcactttctgtgtctctgtctttcccttttgggtatttctgtttcattcattcattcattcattcattcattcattcatccatccatgcaagaaaccctcactcagcgctcccaaggtccctttagcctaattcaacggccctgccagggttccaatttcccctgggacacgtgctgtgtggcttcgggcaaatcatttcacctctctgggtcccgtttctcatctgggcatcaaaagaggcttgatctcctggggttattatgagaattaaacaagttaatgcttgtgatattcctggcacagcgcccagcacaggacgctgggaaatatctgcagctcccactgggaggtggcaattattaccgcgggcgggccctgtcttggtggccggggacaccaattgagctagatagggtgtgtgcgtccgcgaggagctcccgcccttcagtgacggcctctcaagcggatccaggctttctagtttttttttttttttttttttttttgagacggtgtctcgctctgtcccccaggctggagtgcagtggcgcgatctcggctcactgcaagctccgcctcccgggttcacgccgttttcctgcctcagcctcccgagtagctgggactacaggcgcccgccaccacgcccggctaattttttgtattttagtagagacggggtttcaccgtgttggccaggatgatctcgatctcctgaccttgtgatccgcccgcctcagcccctcaaagtactgggattacaggcgtgagccatcgcgctgggccaattttttgtattttttttttagtagagacggggttgcaccgtgttagccagatggtctcgatctcctgacctcatgatccgccggcctcggcctcccaaagcgctaggattacaggtgtgagccaccgcacctggcccaggctttctagttttttgttttttgtttttttgagacagagtctggctctgtcgcccaggctggagtgcagtgttgcgatatcagctcactgcaacatccacctcctgggttcaagcagttctcatgcctcagcctccctagtagctgggattacaggtgcctaccaccatgcccagctaattttttgtattttagtagagacgggatttcaccctgttgcccaggttggtcttgaactcttgatctcaggcaatgcacctgccttggctttccaaagtactgggattacaggtgtgagccaccgcgcccagccctctagttgtttttcaagacagtttttggggtgcgggaagtatccacattcctacttcagtgtgtattttgttatgactatatattagtgcagtatggcttgtaaatgatggataaataaacagatatgcgcttgttggacgtgagtgctcaaaacctttttactgataggtcagtgtggtcaagacaatttaggaaactctggtctggcctgaggaggaagaaacgcagaagataattatagtaaggcaaggggttgcagctcccaaagacgagccactgggctctgtgagagctgggaggaggtgtttgcttaagactgggaggggacacaaaatgtcactaatggtttctggagggaggaagagtggctagtgaggtgacatttgaaagtgagctggagagaggcccatggaaagcgatttggggccgggcattgtggctcacgcctgtcatcccaacaatctgggaggccgaggcgggtggatcacctaagtcaggagttcgagaccagcttggctaacatggtgcaaccctatctctactaaaaatacaaaaattaactgggcgtattggcgcatgcctgtaatcccagctactcaggaggcaggagaatcacttaaacctgggagacggaggctactatgagcagagatcacgtcactgcactccagcctgggtgacagagcaagactccatctcaaaaaaaaaaaaaaaaagaaagaaagaaagaaaaaagtgatttgaacagcatgtgcaaagtccttgctaaggaccatatggtttggcttgaatatgaatcaaagttcagggtgcagggagcactgtcatgagagaagaggctgcagaggagggcagggccagagcttgcagggtgtcagaggccaccctaaggggctgggatcttgtccttgggagctggggcatcaccgcagcagtggggttggctctgggtgtggaaaaactttctggggctgggagaggatgaacaggagctcgggaggaggctgtagagagcgtctgagcgggaggggtagtggcctgagccaggtcagggctttcgggacacagagaggagggcatggggcaaagactcagggggcaggaaggcagagcttggggcttgatgagggtgatgagggagagagggggtgccgccatcggtggatggctccgggacgtatgctctgctgactgggacacagtggggctgtccctgagatggagagctcaggagggcaagcaggtttgggaaatgtcgctgagtgcaatgtgggaatctgtgcatatgagcggcctagggggaccgaggggcatgtggggactgagattgggaaaggtctggactaatgtccagaatctgagaggtccgagttgtagctggtaattgaaactggaagtaggtaagacgtcacagggaaaacaacgtgtaaagtcaggggagttgcaaactggcaattctatagccaattgtgtgcgtgtgtttgtgtgtgtgtgtgtttagaagagcatttaaaaatatctgtcttctgtctctctctcttttttttttttttttttttttgagacagggtcttgctctgttgtccaggctggagtggcacgatcatggttcactgcagccttgacctgctgggctcaagcgatcctcccacatgagcctccggagtagctgggaccacaggcatgcaccaccatgcctggctaattttaaaattttttgtagaaaccgggtctccctttgataccagaccaggctggtatccaactcctggactcaagtgagcctcccacctcactctgcctgccaaagtgctggaattacaggcgagagccaccatacccggctacctcttttttttttttgagacggagtctcgctctatcacccaggctggagtgcagtagtgcgatctcggctcacttcaacctctgcctcctgggttcaagcgattctcctgcctcagccccccgagtagctgggattacaggcacccaccatcacgcctggctaatttttgtacttttagtagagacaaggtttcaccatgttggccaggctgatctcgaactcctgacctcaagtgatctgcccacctgggcctcccaacgtgctgggattacaggtgtgagccactgctcctggccctggctacttctttctgttgagttacttgactggcctctgcacacattgggtttgagaatcatgtagggaaggcttgcactgggaacacctacactcaagggaggtgaaaagcaagagaaagccacaaacaagtcaggcatgaagcagccggggcggggaggaaggccagaggggcaggggtatcctgccaaggagagggtttccagaatgagagcctttcagctgtagccagggccacttgtgatacagtcagatgaaacctgaataagggccgttgtatatggagccaggcaggaaattgatgatttttatcaagaacaatttcaggccaggcacagtgactcacagctgtaatcccagcagtttgagaggccgaggtgggctgatcacttgaggtcaggagtttgagaccagcctggccaatgtggtaaaaccccatctctactaaaaatacaaaaactagccaggtactgtggcacatgcctgtaatcccagctactcaggatgctgaggcacgagagtcgcttgagcccaggtggcagaggttgcagtgagctgagatcgtaccactgcattctagcctgggagacagagcgagactccatctcaaaacaaaacaaaacaaacaaacaaacaaaaaaacaatttatttcagtttctgtggctccaccgaggaaagagtgtaggaggcaagctgtgcagaaggaatggctcctagcactgaatgtcagaattttccacgattttggaaacgttctatgtctacatccaatatggcagtcctggccacagggggctactgggc[136 bp omitted]ctgcctcagcctcccgagtagctgggactacaggcacccgccaccatgccaagctgatttttgtatttttagtagaaacagggtttcaccatgttggccaggctggtctcaaagtcctgacctcaggtgatccgcccaccttggcctccctaagttctgggattacaggcatgaaccactgcacttgacctgaattttttatttgatttaattttaacttattagaacagaaagagctccatggctacaaagaacccatgcagctatcacattggacagtacaagctccagactattccgtgaagagcttttattttattattattatttttttttttttttgaggcagagtctcattctgttgcccaggctggagtgcagtggcacaatctctgctcatcacaacctccgtctcccaggttcaagtgattctcctgcctcagcctcctgagtagctgggactacaggcgcgtaccaccatgcccggctaatttttgtatttttagtagagataaggtttcactatgttggccaggctggtctcgaactcctgacctcatgatccgcccgccttggcctcccaaagtgctgggattacagtcatgagccaccatgcccggccttatttcttatttttagtgacatggtcttgctctgttgcctagcctgaactgcagtggtgtgatcatggcttattgcagccttgaactcctgagctcaagtgatcctcctgctacagcctcctgagtagctggaaccacaggcgtgcaccaccacacctggctaattaaaacaattttttttgtagggatggggtctcgctctattgcccaggctgttctcaaactcctgggctcaagcagtccttctgccttgacctcccaaagtgcttggattgtgcccagccgtccttgaagttttgctcagaagagcaaactttctgggaagtagctgcaggtgttggaagtagctgcaggggaactaggggattcaaggatggagctgaaatgggtgaacggacaaagtcggtaaactgaggcatgccagggccctggaggtagactcaggaatgaagaagacactttattgtagttctcactgtgccaggacctggcctaagtgtgtttggttcatcccatgtgtggatcagttagccgttcttttagtgtctttacggcttttgccaaatccttgtagcacctctgctatcccttctgtaaaattgctcttaaatctgctcactaggtttgtgtaaatacaggtctcccctgatatctgaactcctggaatctggaacaaagaatttagatacatttttctccttctttcttcctttctctttcttttcttttcttttctctctctctttctttctttctctctttctctttctttctctctctttccctccctccctccctcccttccttccttccttcctttccttcctccctctctgtctctctccctccctccttcctttctttccttagttttttttttttttttttttttttttttttttttgagatggagtttcgctcttgtctcccaggctggagtacaatagtgtgatggctcactgcaacttctgcctcctgggttcaaccaattctcctgcctcagccttctgagtagctgggattacaggcacccgccaccacgaccagctaatttttgtattttttttagtacagacagtgtttcaccatgttggccagtctggtctcaaactcttgacctcagatgatccacccgcctcagcctcccaaagtgctgggattacaggcatgagccactgcgcccggcctcttgcttgcttgcttgcttgcttgcttgcttgcttgcttgcttttctttccttcttttcttttttttgaacagggtctcactctgttgcccaggttggagtgcagtggcgtggtcacagctctctgcatcactgcagccttgatctcccaggctgaagtgatcctcctgcctcagcctcctaagcacatgctgccacacctggctaattttattttattttattttatttatttatttatttttagagacagggtctgactatattgcacagctggtctcgaactcctgggttcaggtgatcctctggccccagcctcccaaagtgctaggattacaggcatgagccatcatacccgaccctacattttcaaatgaatttctcattctccaaacccctgttacttactcaggtgccaatcacctttagaaagcaagagagacttgtgcatttctttaggtgggggaaagttttatatgtggaaactttccaaatggaaacctgttccatttggcacagagaggaagaaacaagccacacagaagccaaagacaatgaaaagcaaacaaaggtgtttccctactcgctagatggctgttgccagctccattttttgagcccgaggcctgcttttcttgttcaaaagagtagcaaagggttaggcattcaaaaatattctagcacccggctgagcctctctccttgacagtcgtcaggagaactgaaaaaggaatgactttctcactgcgttattcaaggttattttaagctccgtgtgaagttcgtgtcgcgttgcctctggctgggactggtatgcgagcctcatttcaggaaacacggcgttctttccctggctcctcatagctccgtggagtaggccgcgctattattgtcttttcattagaggaggaaatttaggctcagagaggtgaagccgctcgcccaaagtcacacagccgcgtcagccccgagcatgcgggctctccctgagttacccgctggatgttctttctcgtgttgaacgtcatgtgtttggatgggggcacagggcacagcaaggatacccccagtggccctctgccttcccacttgaggctcctcaggtgacagtgacctgcttcttcctgctcaggctttctggactcactggcttccttcccgtggggaaaggggaccgtcctcggctccagtctctccccgaggccgtcagagccagggccaggggcagcgtggactctgcctgcctctgtgggtgtggactcagtgtcgacagccccctctacaggagcatgaacacgctgacagggtgctggggtcggggggcagccctgggttcacgctccgccctcgcacccccagagggaccttgtgccagtgtgggcgcccccggaccgcccaccccgcagtggccatggaggatgccttcggggcagccgtggtgaccgtgtgggacagcgatgcacacaccacggagaagcccaccgatgcctacggagagctggacttcacgggggccggccgcaagcacagcaatgtgaggcgggcctctgtgggcggggcccgggcaccagggggctgcatgctcggggctccagagtggagccgggacgcccgccctgaaccctggcccctccgcccatccctgtcttggctctctttgtcccctccgccccacctatcttctctctgagggggtcccgttctctctgcgtctctttgtctctgtctccctctgtctccgtgtccctctctctctgggtctctgtccccctctctctctgggtctctgtccccctctctctctgggtctctgtccccctctctctctgggtctctgtccccctctctctctgggtctctgtccccctctctctctgggtctctgtccccctctctctctgggtctctgtccccctctctctctgggtctctgtccccctctctctctgggtctctgtccccgtctctccgggtctctgtttccccttttctgtgggtcactgtcctcatctctttgggtctgtgtttccgcttttctctgtgtctctgtccccgtctctctgggtctctgtctctgtctctctgggtctctgtctctgtctctctgggcctctgtttccccttttctctgtgtctctgtccccgtctctctgggtctctgtcttcctctctctgggtctgtttccccctctctctgggtctctgtccccatctctctgggtctctgtctgtttctccgggtctccgtccctgtctctccgggtctctgtttccccttttctctgggtctctgtccttgtctctctgggtctctgtccctgtttctccgggtctctgtccccgtctctccgggtctctgtttcccctttactctgggtttctgtccccatctctctgggtctctgtccctctctctctgggtctctgtccctctctctctgggtctctgtccctctctctctgggtctctgtcgccatctctctgggtctctgtcccatgtctctgggtctctgtccctctctctctgggtctctgtccctctctctctgggtctctgtccctctctctctgggtctctgtccctctctctctgggtctctgtccccgtctctccgggtctctgtttcccctttactctgggtttctgtccccatctctctgggtctctgtccctctctctctgggtctctgtccccgtctctccgggtctctgtttcccctttactctgggtttctgtccccatctctctgggtctctgtccctctctctctgggtctctgtcgccatctctctgggtctctgtccctctctctctgggtctctgtccctctctctctgggtctttgtccccgtctctctgggtctctgtccccgtctctctgggtctctgtccctctctctctgggtctctgtcccatctctctgggtctctgtcccatgtctctgggtctctgtccctctctctctgggtctctgtcccatgtctctgggtctctgtccctctctctctgggtctctgtccccatctctctgggtctctgtccctctctctctgggtctctgtccctctctctctgggtctctgtccccatctctctgggtctctgtccctctctctctgggtctctgtccccgtctctctgggtctctgtccccgtctctctgggtctctgtccccgtctctctgggtctctgtccccctccctgtgtgccccgctcccatgtgtccacagttcctccggctctctgaccgaacggatccagctgcagtttatagtctggtcacacgcacatggggcttccgtgccccgaacctggtggtgtcagtgctggggggatcggggggccccgtcctccagacctggctgcaggacctgctgcgtcgtgggctggtgcgggctgcccagagcacaggtgaccgagggtgggtgggggctgtctcctgggcctcggcctgcctgccatctcccccacgactgtgggtggcctcccccgccgcccagtgtgtgtgtgtgtctctgtcttattctttgtttctctccccctgcctctgcatgttcctcggcgtctgtgtaggagcctggattgtcactgggggtctgcacacgggcatcggccggcatgttggtgtggctgtacgggaccatcagatggccagcactgggggcaccaaggtggtggccatgggtgtggccccctggggtgtggtccggaatagagacaccctcatcaaccccaaggtgtgacccagggacttggaaaagggggctggaggcctggactcctgggtctgagggaggaggaggggctcgtgtttgtccttctggccccgatgaggagacgccctggtctggccatttttcccctagggctcgttccctgcgaggtaccggtggcgcggtgacccggaggacggggtccagtttcccctggactacaactactcggccttcttcctggtggacgacggcacacacggctgcctggggggcgagaaccgcttccgcttgcgcctggagtcctacatctcacagcagaagacgggcgtgggaggtgagtggtcgaacccatgacccacaacccacgacccacaacctgcaaccccagcgctcaggatcccagtagtttggtctggtcgagatttggggaattacctatggttaagtgtctttccccgtcattattcatggttttaaaaacttctgtctgagagtgagttagctcacatcagtaatcccaacactttgggaggccgaggtaggaggattgcttgaggccagtaattcaagaccagcctgggtaacagagcaagaccttgtctctaccaataataataataataataataataaagaataaaaaataaattagccaggtgtggtgtcgtgtgcctgtaatcccagctacttgggaggctaaggtgagagaactgcttgaacccgggaggtggaggttgcagtgagccgagatcaagccactgcactccagcctgggcgacaaagcaatactccatctcaaacaaacaaacagactttattttgaaatttctcatacatacagaaaaatgcacgaaggtggacagcttgatgcatttttttctttttttgagacggagttttgccctgttgcccaggctggagtgcagtggcgcgatctcggctcactgcagcctctgcctcctgggttcaagcaattctcctgcctcagcctcctgcctcagactcctgagtagctgggattacaggcacgtgccatcacacccggctaatttttgtatttttagtagacggggtttcaccgtgttagccaggatggtcttgatctcctgaccttgtgatctgcctgctttggcctcccgaagtgctgggattacaggtgtgagccaccgcgcccggcctaatgtttgtatttttagtagagatgaggtttcaccttgttggctaggctgttttcgaacttctgacctcaagtgattcgcccacctcagcctcccaaagtgctaggattacagacgtgagccactgcacctggctccggctaatttttaaagttttttgtagagacagggttttgccatgcagcccaggtggcctcaaactcgtggtcgaaagtggtccacctgcctcagcctcccaaagtgctgggattacggtcgtgagccactgcgcccagccagccaatatcttataattttatcaaaacatgaacaagatacattactaggtttgaggaaagtttttgatttttgtgtatttttcttgtatcaatcctcttaccaaattttcttattgatctttatttttatttttggtggggttttccaattttctgggaatacaagccatgttttcttcaaataggtacttttgtcccttccagctttacaaaaaaccaaaaaccaaaaaatcaattttcacttcagtgatttcatttttttgcattattgagttagctcaaaactccaggatgaatacagtgttagtggtaatgtggtctagtttctaatttatttatttatttttttgagagggagtcctgctctgtgcacaggctggagtgcagtggcgtgatctcagctcactgcaacttctgcctcctaggttcaagcgtttttcctgcctcagcctcccgagtagctgggactataggcacgagccaccactcccagctaatttttgtatttttggtaga[144 bp omitted]atatagtgctatctttatggtgcaattggattttggtaaatatctatattgtggttagatagccctttctattcccatttcctttactttctatttgaactttcactccctctggctcctggatggttaatcaatgacaggattgactcatacaagaaacacctgcctcattcagggactcaggagtctaggtcctcagccccctcctccctggggaagttaagcattactgtcttcaaaatctagctccctcctgaagtgtccaaagacatgacaattctggccaggcgcgctggctcacagctgtaatcccagcactttgggaggccaaggtgggaggatcccttgagtccaggaattcgagaccagcctgggcaagatggcaagacccctgtctctaccaaaaattaaaaagttagctgggcacggtggtgtgtgcctgtggtcccagctacttagaaggctaaagtaggaggatcaagatgtagtgaggtgtgatcatgcccctgcactctatcctgggcgatagagtgacaccctgtttcagaaattaggctgatgcggtggctcatgcctataatcccagcactttgggagtccaagttgggaggattgcttgaggccaggagttcgagaccaccctggccaacatagcaagacccccatttctaaaataaatacataattaagtaaaaaaagaaatgacaattccaatgagcctctgaacagaagattaggacaaggctgatgtttgccgactcctgggaaatgcggttttctcctatctccagcaaaggctgatgggaggtaatcaagcccccttctcttcttgcctcagggactggaattgacatccctgtcctgctcctcctgattgatggtgatgagaagatgttgacggtataggggcccggatgcccggatctaagggggaaggagggttgggggccaggactcctgggtcctgagtcttagggagggtctgggggtctgactccgggtagggtgaatatcctgccttttctgacgtgatgaataaagaatgcctttatcctgtagcgaatagagaacgccacccaggctcagctcccatgtctcctcgtggctggctcagggggagctgcggactgcctggcggagaccctggaagacactctggccccagggagtgggggagccaggcaaggcgaagcccgagatcgaatcaggcgtttctttcccaaaggggaccttgaggtcctgcaggcccaggtatgacactgggggcccaactctggatcctgagatgggagggaactggggacttgggctcctgggtctgagggaggaggggctgggggcctggacttccaggttccgggagaagagggtgctgggcatatagactattaggtcctggaggggaatggcctcctccatccctttggacagggcccaacaggagttggggatggaggcgggctagggatgcagaactggctattccacaggtggagaggattatgacccggaaggagctcctgacagtctattcttctgaggatgggtctgaggaattcgagaccatagttttgaaggcccttgtgaagggtaaaagttgtaccctccagtcttccccctctctcagttcaaccttagacacctttcctggcctgggcacttcatccaccctctctaatccaaggcccatgccccctttacccctcttaatatttttcccctttggggctttgcatggtgctatttgggcagttttcccagatgctttcattatgttccagcatctgctttcctctgttggatccatccatccattctttcatctttccatccatccacatgtacagatcgatctttccatctctttacctaccatccttccagtcatccctcattctttcatccatccatcctttcacctgtccatccacacatccactgacaattcctgagaattccatccgctcattcctccatccgtcttctcacctgtccatccacacatccactgacaattccattcagtcattcttccatccatccatcttctcacctgtccatccatgcatccactgacaattcctgagaatgccatctgctcattcttccatccatccatcttctcacctgtccatctacacatccaccgaaaattcctgagaattccatccactcattcctccatccatccatcttctcacctgtccatccacacatccactgacaattccattcactcattcttccatccatccatcttctcacctgtccatccacacatccactgacaattcctgagaatgccatccgctcattcctccatccgtcttctcacctgtccatccacacatccactgacaattcctgagaattccatccgctcattcctccatccgtcttctcacctgtccatccacacatccactgacaattccatccacttattgttccatccatccatcttctcacctgtccatccacacatccactgaaaattccattcactcattcttccatccatccatcttctcacctgtccatccacacatccactgacaattccattcacttattcttccatccatccatcttctcacctgtccatccatgcatccactgacaattcctgagaatgccatctgctcattcttctatccatccatcttctcacctgtccatctgcacatccactgaaaattcctgagaattccatctactcattcctccatccatccatcttctcacctgtccatccacacatccactgacaattcctgagaattccatccgctcattcctccatccatccatcttctcacctgtccatccacacatccactgacaattccattcactcattcctccatccacccatcttccatccatttacccatctacccatccatcttttcattcatccatccaactgttcttccatctatccatccacccacccattcttccttccctacatgcttccaatatacatgaagcactctggctagacatgaaccaaagcactgtctcccagtgaggaagtccagatatttcactagaaatggcagcttggaggacggaatgatgaaaaccaaggcgggggagcataatgcacacctgggagaggctggggagggtcttatttatttattcacttattgagacagggtcttgctctgtaggccaagctggagtatagtggtgtgatcacggctcagtgcagcctcaacctcccaggctcaagtgatcctcccaccccagccttccaagtagctgggaacatacccgcccaccactacacctggtaaattaaacaaaaaaaaaattttttttttgtacagacgaggtcttgctctgttgcccatgctggtcatgaactcctggcctcaactgatcctcctgcctcagtctcccaaagtgctgggattacaggcatgagccaccatgccagcctcctttatttagtcaacaaatacaatcctaggctccagagactaaagccaacccatttcctgctctcaaagaccccagatcccactaggattgtttggatacaaccttaggtaaaatttaagacagaagcacaggcaagaatcactgtcgttagaaggaaaacttcaaggaaaagttgtgtgtgtgtgtgtgtgtgtattttgagacagagtcttgctctgtcgcccaggctggagtgcagtggtgcgagcttggctcactgcaacctccgcctcccgggttcaagcgattctcctgcctcaccctcctgagtagccgggattacaggcacgtgccatcatgcccggctgatttttgtatttttagtagagacggtgttt[131 bp omitted]gccaggcacagtggctcacacgtgtaatttcagcactttgggaggctgaggagggaagatcgcttgagcccaggagtttgagaccagcctgggcagcatggtgaaatgccacctctataaaaaatacaaataataagttggggagggtggcgcatacctgtaatcccagctacttgggtggctgaggcaggggaatcgctcgaacctaggaggcagattgtgccactgcactccagcctgggtgatagggcaagactctgtctcaaaaaaaaaaaaaaaaaacctaaataaataaaccaaataaactggaccttgataagtcagtagaatttggatttagtaagctaacgagtgggacagataagtattcaggaagattcccagggctctgtgtggggagggtcatttttggtgtcagaagaacttttttctttttttttttgagataaggcctcgctctgttgctcaggctggagtgcagtggtgtgatcttgacccactacagtcttgacctcctgggctcaagagatcctctcacctcagccccacaagtagctgggaccacaggcatgtgccatcatgcctggctttttttttttttttttttttttttgagacggagtttcgctcttgttgtccaggctggagtgcaatagtgccatctcagctcactgcaacctccgcctcccgggctcaagtgattctcctgcctcagcctcccaagtagctgggattacaggcatgcgccaccacacctggctaattttgtagttttagtagagatggggt[136 bp omitted]cactatgttgcccaggctggtctcgaactcctgggctaaagctatctgcccatctcggcctcccaacgtgctgggattacaggcgtgagccattgtgcttaggccagaagaattttacgggggaaatacacactaagatagaaactccccagatacacggtggcaatatatacagcattctacctcagctccccacccatgtttgtggtg[164 bp omitted]gcctcccgagtagttgggctctctatttttagta[153 bp omitted]caggctggagtgcaatggcgccatctcagctcactgcaacctcctcctcccaggtttaagcgattctcctgcctcagcctcctgagtagctgggattacaggtgcccacaaccgcacccggctaatttttgtatttttagtacagacagggtttcgccatgttggccaggctggttttgaactcctgacctcaggtgatccacccgcctcggcctcccaaagtacttggattacaggtgtgagccaccgcgcccggccttaattcatttttaggtattttttgagacagtctcactctgttgtccaggctggagtgcagtgggacaatcatagctcactgcagccttgagatcctgggctcaagtgattctctcgcatcagcctctgagtagctgtgcgccaccacaccaggctaatttatttttaatttttttatagggatagggtctccctatgttgcctgggctggtcttgaactcttgggctgaagagatcctcctgccttgacctcccaaagtgctaggtatagtacaggctgtggtagggtagaaagagcaagttatttttgctttggaatcagacaaaactgaatttaaataccagcttgggccgggtacagtggctcacgcctataatcccaacattttgggaggctgaggtaggatcacttgaggtcaggagttcgagatcagcctggccaccatggcaaaaccctgtctctactgaaaatacaaaaattagctggcgtggtggcgggtgcctgtaatcccaactagttgggaggctgaggca[148 bp omitted]cttgaggaagcagcttcccctctctgagccccagtttctctctgtggaaagtggagataatatcttacaggagtgttataagcctccatggcaaggtatgagttgtgcccggtcccggtgggggcccaataagagggatctcctcttaatatgattccatttcctctgggggtacatccttcaatataaggtaactctcagtgggcaaatctgattcactctgcggaagttaactcagcagcctcctgggagaaaatacggcagctctgcaagatgtggtttgagggggtggtgttgtaagcccagcaggagtggaagtgatcacagtccactgggggaactggagatggctgataggcttggggatagcagagttgaatggatggaatttcagcaagaaagaag[134 bp omitted]agcctcccgagaagctgggactacaggcacctgccactatgcctggctaatgtttgtatttttagtagagatggggtt[132 bp omitted]gcaggcccagtgctgggcagttggtgtactcttttgcccttcatctcccttccctgcctgcaaggattatcaccccattttgcagatgaagagactgaggctcagagagaggaaaaatggcttgcccagggtcatccagctagtagcaggggtcaggcttttcatgtgagtctgtataattctcaagcccattgcaaggggcatgtttggagagaggtcagaggctcgcagggttggtatgtatcattggcatgaagggagtgttggagacaaggccagtgaggcaggtagggccaaaccacccaggacctcaaatgccaggcagaggggctaaggctgtccttgagaggcagcagaggaccagggtccgttatgtggataaaaaagactctctggccaagcgtgaaggctcatgcctattatcacagcaccttggaagactaaggaaggaggttcgcttgagcccaggagtttgagaccagcctgggcagcatagtgagaccccatgtctataaaaaattagctgggtatggtactgtgcgcctgtagtcccagctactcgggaggctgaggcaggaggatcgcttgagcctgggaggtctcaaagctgaagtgagctgtgatggcgccactgcactccagactgggtgacagacgaagaccctgtctcaaaaaacaaaaacagactctctgggagtgggtgggggcagagtggagaggagagaagagactgcagtgatggtgtttgggggtgccgaagcttgagctatagctggggccaggaggacagtcggggaggctcagcagagagtcaggaggctggacgtgggacatgaagcttgggggctgatggcctgtgagatgggaggagcaggaagggacaaggacagtacctgcgggtctgccttattgattgggtggacagaggggccattcctgagatgaggacgtagggaagatgggtttgagggctagatgctgagttgagtatggaacacggtgagtctgaagggacaaggtggggccagggtcgagtgcccaggtgacaaatggtgccagattaaggcggaatataaagcaaggtattattattattattatttttatttttttattttttttgagatggagtcttgctctgtcgtccaggctggagtgcagtggcacgatcttggctcactacaagctccacctcccaggttcatgccatcctcctgcctcagcctcctgagtagctggcactacaggcgcccgccaccatgcccggctaattttttgtatatttagtagagatggggtttcactgtgttaaccagggtggtctcgatctcttgacctcatgatccacccatctcggcctcccaaagtgctgggattacaggtgtgagccactgtgcccggcctattattattatttttgcaacagagtttcgctctgttgcccaggctggagtgcaatggcgtgatcttggctcactgcaacctccacctcccgggttcaagcgattttcctgcctcagcctcccaagtagctgggattacaggcatgagccaccacgcccagctaattttgtatttttagcagagacgaggtttctccatgttggtcaggctggtctcgaactcctgacctcaggtgattcgcccacctcggcctcccaaggtgttgggattacaggcatgagccacagcatccagcctattattattatttgagacggagtctccctttctcacccaggctggaatgcagtgacgtgatctcggctcactgcaacctccacctcccgggttcaagcgattctcctgctcagcctcccaagtagctgggactacagacgcatgccaccatgcccagctaattttttgtattttagtagagatggggtttcaccgt[137 bp omitted]ttgaaactgtggggaaagtaggagagcttcatagaatcgtagaaagtcgtggaaaagtccgctctgaatggacgtctgggttttgaaagagcacagaaagccatgaggtcctagacatgttactgcctttctgggcctctgtttcctcaagcacagccttggaggttacactggccaagctgtagtgtcgccacagcgtggaacttcttcccacagttactgtaattgattacagtgctatgaagggggtgccactatttcccatttaatagatgaggaaactgaggctcccaaggttcaatggcttgcctgaagtcactcagttggtactggtggaccggggactggaacccacgtctgcctgccccagagcctattgctcacctccactacatgagattatctctttctgtggtaccagtttttggagcaaccaaaatgagatgaatttgttttggagatagatatggagcaagtggaggcagaaggaaacctaactccatgtcacgacaaatgcccttcaggacttttcatgcccctgttgactgcacatgtttggatccactacatagctggatcaaatttttaagggtttctggttctctcttgctgtttcagtgacctccagggtctctcggagtccctctcctgttctcattttctgctgttgtcacctctttcccttcacaatataccccaagtttcagaaatcagagtgactcacgtttgtcatcatctgctgtgtgtgtgtgtgtgtgtgtgtgtgtgtgtgtgtgtgtgtgtgtgtgttgcacccgggcctttgcttctgctgtgcctgctgctttgaacgcccttttcgcaccttaggggcatacctcccagtcctggtggtctttcaaagtgctacctcaacacccattctctgggagctctcttgggccactctatacctctgtgaccatatcctcctctgggccctaatcatattatatgcctatagatgcctccttagacacccctccaccctgccttccattatggcctgtccagccttccctttaatcgcccatccatctctgattgtccgtctgccccatcttgtttcctctctccccatccatccgtctgtccatctatccatctatccaccctgtacatccatctatccatccatccgttcattcatccatctctttatcctttcatccatccatttatccatcccatccatccatccttctatctgtccatccatccatcctaatcatattatatgcctacctctgagggcaccaagcaccctgagggtagttatgtgttggggggacatatttcccccaatagaaccagcttcttcagggtaggaactgtatctgatttctctctccatccctcccactgcttggtccataacatacctcaataaatattaaatgaataagtgattccttttgtttcttcttgggggctgtaaaccagtggtctgtgctctggccctgagccaaatgaccttatgcctatgatagcctgactgctttaagacccccacactctgcccagtagcaacccctttatgcagagtttaaaagtcagacatgcaaaatagaggcaaaatagacattcagcagatgtccctcctcccctgacttcttgtcccctctccctctaatccttccagcctgtgggagctcggaggcctcagcctacctggatgagctgcgtttggctgtggcttggaaccgcgtggacattgcccagagtgaactctttcggggggacatccaatggcgggtgaggggtcagggcctgggggttgggcatactgacaaagggactgtgctgtcctccctctctgccttctttttttttttttttttttttgacggagtctcactctgtcacccagcctggagtgcagaggtgtgatcccagctcactgcaagctccgccacctgggttcacgccattctcctgcctc[134 bp omitted]caggctcccaaagtgctggggttacaggcatgagccaccgcacccggcctctctgccttcttagacgcccctcaaccctgccttccattatggcctgtccagccttcccttaattgtccatccatctctgtccatctgccccatcttgtttcctctctccccacccatccatctgtctatccatccatccaccctgtacctccatctatccattcatccattcattcatccatctacttatccatccatccatccatttgtccatccatccatttatccatccatccatccatccatccatccatccatctgtccatccatccatccatccatccatccatccatctgtccattcatccatccatccattcatctgtccatccatccatctacctatccattcatccatacatccatccatctacctatccattcatccatccatccatccatctatccatccatccatctgtccatccattcatctgtccatccatccatctacctatccgttcatccatccatccctctgtccatccatccatccctctgtccatccatccatccctctgtccatccatccatccatccatccatccatccatccatctgcccatccatccatctgtccatccatccatctacctatccattcatccatccatccacccatccatccatccatccatccatccatccatccatccatccatccatccgtccctcatacccttgcccatctcttgtccttaacctttgagctaatctcttcccctattcatcccaccctgccagtccttccatctcgaagcttccctcatggacgccctgctgaatgaccggcctgagttcgtgcgcttgctcatttcccacggcctcagcctgggccacttcctgaccccgatgcgcctggcccaactctacagcgcggcgccctccaactcgctcatccgcaaccttttggaccaggcgtcccacagcgcaggcaccaaagccccagccctaaaagggggagctgcggagctccggccccctgacgtggggcatgtgctgaggatgctgctggggaagatgtgcgcgccgaggtacccctccgggggcgcctgggaccctcacccaggccagggcttcggggagagcgtaaggaccgggcaaagctggggggcccccccgcgcgggaaggacctgggggcgggattacatcagggatggggcgtggccaaaccagaggcagggctggtggtggccagtgttggggaggggctggtcctcaccacccctccttttgctggcagatgtatctgctctcggacaaggccacctcgccgctctcgctggatgctggcctcgggcaggccccctggagcgacctgcttctttgggcactgttgctgaacagggcacagatggccatgtacttctgggagatggtgagtgctgacttggcgctcctgcatccctgtcctttaggccactggatgccagtgttcccgaaacaattaccatacaattccccgacccctgacgtcacctgacaggcgccccatcctccgtcgctgatatatgcctccaactg[137 bp omitted]aagtaattctcctgcctcagcctccggagtagctgggattacaggcacctgcccccacgcctggctaatttttgttttgttttgttttgttttagtagagatggggtttcaccatgttggccaggctggactcctgacctcaagtgatccacccgcctcggcttcccaaaatgctgggattacaggcatgtgccaccgtgcctggccaagattctctctttgttttggcctttgataatatatctcagtgtggatctctgtgaatttctttttctttttcttttttttttttttttgagatggagtcctgctctgttgcccaggctggagtgcagtggcatgatctcggctcactgcaagctccaccttctgggttcatgccattctcctgcctcagcctcccgagtagctgggactacaggcgcccgccaccacgcccagctaattttttgtatttttagtagagatggggtttcaccgtggtcttgatctcctgaccttgtgatctgtctgccttggcctcccgaagtgctgggattacaggcgtgagccactgtgcttggcctgtgaatttcttttacttggagttccttgagcttcctggatgtgtagacttttgtctttcatcacattttggaagtttttaggacattatatcttcaaatattatttctttccctttctgtctctcttttccttttggactctcattatgtatgtattaatattctgtatggtgtctcgcaagtcccttaggctctgcttattttccttcatttgtttttcttttttctcctcaggctggataatctcaatgtacttagcttcaaattcactgatctttattttgccttttttatgaatctactgttgagtccctctagtggtttttatatttcagttattgt[142 bp omitted]tgcctcctgggttcacgccattctcctgcctccacgccattctcctgcctcagcctcccaagtagctgggactacaggtgcccgccaccacgcccagctaatttttttgtatttttttagagacagggttt[141 bp omitted]aactttatttttgattacagtaccattctcaatctcttctacaaaaagcagaaaaaaaagcagccacttcactcaagacctatatacagataagatgttttctgtgtttttttcttttttttttaatttttatttttaaaaaaataaattcagtgttcacatttctataaagaattaacccagtttcaggaaaccctgcctctatctctgtattcttattctctaggtggtgagacatctttttcctggctccctttagttcttttttcatgatttcctttagctcttcgagcatatttaagacaatttatttaaagcctttgctagtaagttcagtgtctgagtttcctcagggatagtttctattcatttatttttttcctactcatttctattcatttcatttcttttcttttatttatttatttgttgttcttgttgttgttgttgagacagagtctcattctgtcactcagactggactgcagtggtttgaccaaagttcactgcaaccttgacttcttggactcaagcaatcctcccacctcagcctcctgagtagttgggtctaccagccacatgccaagctaattttaaaaaatttgcagagatggggtcttactatgttgcccaggttggtcttgaattcttgggctcaagcaatcctcctgcctgggcctcccaaagtgctgggattacaggtgtgagccaccatgcctggtctctattaatttcttttttttccagtatatgaaccatattgtcttgtttctttgcatgcctcataatttttggttgaaaagtggaacattttgaatatgataatgtggcaactctggaaatcagcttatgccctccctccagggtttgttgtggctgctgctcattgtgggtcattgttgtttgtttagtgacttttcttttttctttttcttttttttggggggaggggggatggagtctcactctgtggcccaggctagagtacagtggtgcaatctcggctcactgcaagctccacctcccaggtttaagtgattctcctgcctcagcctcccaagtagctgggattacaggtgtgtgccaccacacccagctaatttttgtatttttcatagagacggggtttcaccatgttagccaggctggtctcaaactcctgacctcaggtgatccacccaccttggcctcccaaagtgttaggattacaggcgtgagccaccgcgcccaccctgtttagtgacttctctaaaccttttttggaaagtctgtattctttgcatgtgtggccatggaagcccctcttctgttagcttagtggtctgctggtgacttgacagagatatccttaaatgcctagaaccacagaagcaaatataacaagaaactccctataagtgctgggattagaggcatgagcgacgcccaccgtggctgtatattgaagcagtctttcaatacttagccaagctgtttacagttctgctttagtcttcacttcctgcttgtgcagagcctaaagttcagccagatgtaagagcttcaggttttctctggtattttctgagcacgcctctagccctagtcatgcatctagccgtctggatttcctggtacacaaggaagactttcaaagcccttattccctccaagtatttcctttcatggcctctttcttcccaagatgcttagtgtatctattactgcctctactgtgagtccttgcctcagatggatgtggtt[132 bp omitted]gaaaccctatctctactaaaagcacaaaaaattagcctggcatggtggcgcatatctgtaattccagctactcgggaggctgaggcaggagaattgcttgaacctcggaggcagaggttgtggtgggctgagattgcagcattgcactccagcctgggcaacaagagtgaaactccgtctcaaaaaaaaaaaaaaagattttaacacacactgcctggaaagccactttttctctggggaaagctctaaggcaggtgaagcaaagtcaagtccttgagctgttgcttcagggagccaccagatagggccacacacacaaccacaattctggagggtaagtctgaattgctccctctagtactagcgacccacaccaggaatgtgtgtctttgtcttcaaggttgccactgaactggggagctgggggtagtaagtgggtaggttaaaatgtcacagtaccctcttactgaaatttagtggtctcttcattaagcattttcttgtttttttttttttataagttttcgattagattccagaattctagaaaagttgattctgacaacttttgatagctattgattgcttttgtggagggataaagttttgaagttccctacactggcatttttggtcacctctccaagggcttttaaaaatttcattgttagagacagggtcttcctcagtcatccaggctggagtgcagtggcatgatcatggctcactgcagcctcaacctactgggctcattcgatcctcctacctcagcttccctagtagctgggactacagaagcagaccaccacgcctggctaactaaaaaaaaaaaaattttgtagagatggagtctcaccatgttgcctggctggtcttgaattcctgggctcaagcaatcctcctcatttgtaaccacccaatgggttcacgttgcccgctgcctagacagagccgatttatcaaaacaaggaaagtgtaatggagaaagagtaattcgcgcagagccggctgtgcgggagacctcagttttattatcactcaaatcagtctcctcgaggattcagggatcagagcttttaaagataatttggtgggtagaggcttgggaagtggggagtgctgattggtcaggttggagatggaatcacaggggttggaagtgaggtttttcttgctgttttctgttcctgggtgggatggcagaactggttgagccagactacagtctgggtggtgtcagctgatccatccagtgcagggtctgcaaactatctcaagcactcatcttaggtgttacagtaatgatgttatccccaggagcaattgggggagccagaggctgcgtgacccctaaacttaatttctaatcttgtagctaatttgttagtcctgcaaaggtagactggtccccaggcaagatgggggtctttggggaaagggctattatcaatttcgtttcagagtcaaaccatgaacagaattccttcccaaagttagttcagcctatgcccaggaatgagcgaggacagcttaagggttagaagcaagatggagtcggttaggtctgatttctttcattgtcataattttctcagttatcatttttgcaaaggtggtttcacttcagcctcccaacgtgctgggattatagtcgtgagccactttacccagcctccaactgcttcttgacctgtctgtgactgctgaattgattctaactgcagcccagcccctgacttgcatccctggtctctgaaccacctgacttctggcattttcaactgactttcagtttcttccagatccatctccaaacattacttcatccttggcctctgatgaccccagttagtttctgacctctgactctgttccttcccttgacttcaggcttcctccccctctatgaaccctctttgacgcatccgtgccctctttgtctctccagggttccaatgcagtttcctcagctcttggggcctgtttgctgctccgggtgatggcacgcctggagcctgacgctgaggaggcagcacggaggaaagacctggcgttcaagtttgaggggatgggcgttggtgcgtggggcacggtgcctgggagcagggacgggggctgccgccagagggggatgtgcaactccgcactcctcacatatccctgcgccatccccttaaattcccttacctctcccttcacaccctcaccctactccttcccatccctgtcacataactaactcctctgccccagacctctttggcgagtgctatcgcagcagtgaggtgagggctgcccgcctcctcctccgtcgctgcccgctctggggggatgccacttgcctccagctggccatgcaagctgacgcccgtgccttctttgcccaggatggggtacaggtgagtatctgcgacaccaacatcccaaacagtctccaagtggactctgggaagtatggggatgagcccctgccattgggaacatctatggtcttgaccagccactctccctggagatcccccagaaagtctctcttctctctcagaaaggctgctcttcccataagaagccccgctcccttccaccaaaagccaaccttcccacggcaaagcccatcttcctaaaaagttccactccagatagagaaactccttgtgaccctgtcaggaaattccacctttaaccttggaagtccttcccgctttcagggaagagtccatttctttcaaaggaagtcctagctcatccacaggaagtcctacggcatccacaggaagtcctttccacttcctttagaggtccctagtttcagttttcagcagttagaatggcctcactgaacaattacctttttttttttttggacataaacaaactttggtctaggaaatctcacccttcctataggaaatcatctgccttgggaagccctacttgctcccacagtctctccgatcctgacaagttgacattttggaaacattatcaatatttttagtttaaatctgacaggggctcagagtcccactttagtacaggaagttgtgcccaacaggaagtcccatcctcatctgttggaatggtttggctgacatttcaaacagctacccagagtcccttgctgtggatagtggttaaactcatggattccagctctaccacatacaaactgtgtttctttgggccgtttccttaacctctctgtgcctcatgtgtaccaaggaggagatactagtacccacccccttatgtgtcaagggttcggtggactaatctacataaagtgcttagccctgtatctgccatatggtgtcaatttaagtgttgactgtttactgccaaaacctggcctaagttgtctttgcctttcaccaccgtttccctacctcaatagttgtggctgtgacattgggcacttgctctgtactctggagctgcagtccaacccttgctgggcgtcttagggacggggctgtgggggagatttggatcctaatccttcccaccccccacagtctctgctgacacagaagtggtggggagatatggccagcactacacccatctgggccctggttctcgccttcttttgccctccactcatctacacccgcctcatcaccttcaggtcagtaccctggggtgagagtggtggggatgggggcggggtgctcagtttctccttcctgccccctctgcccacctttcttccctcatcggcccattgtgtcccttccctaggaatgggactctctgtccctccactaagggagtgctgtgggaggtgagttttgggggggatcctccctgtggtatctctagtggcagttactctgcctttctggccatggctctgggggaaggtccctttgggatgactttaggagaccacctctctgtccctctgccatgtctccgggtgaagaagtttgagttttgctggagaatgcctctccaccttctcttcccctcatttcttgctctgtgcttccccccttgctaggaaatcagaagaggagcccacacgggaggagctagagtttgacatggatagtgtcattaatggggaagggcctgtcgggtgagtggagcctccagcactgtgtgaggtggggacaccctgggcagttcaggacatgtgccagttccacgttgtgttagtcccctcttgagttgctacaaagttgctaaacctgagactgagtaatttataaagaaaagaggtttcattggctcatggttctgcaggttgtacaggaagcatagtgctggcatctgcggctggtgagccctcaggaagcttccactcatggcagaaagtgagggaggagccagtgtatcacatggcgagagcagaagcaggagtaggggtgccacatagatctcatgtgaactaactgagcaaaaagtctccaaagggatggtgctgagccatttgtgaaggacccaccaccaggacccaaacacttcccccaggccccacctccaacattagggattacatttctttgttctttttttctttttttttgatacggagtctccctcagttgcccaggctggagtgcagtggtacaatcttggctcactgcagcctctgtttcctgggttcctgatcagcctgcctcagcctcccaagtaggtgggagtagaagtgcatgccactacgcccagctaatttttgtatctttaaagtagagtcgggatttcaccatgttggccaggctggtgtcaacctcctgacctcaagtgatccgcgcactttggcctcccaaagtgctgggattacaggtgtgagccaccgggcccagccagggattacatttctttctttcttttttgaaatggggtctcgctctgtcgaccaggctggagtgcagtggtgtgatctccgcctcctgggttcaagcgattctcctgcctcagcctcccgaatagctgggactacaggagcccaccaccacacctggctaacttttgtacttttagtagtgacagggtttcatcacattggccaggctggtcttgaactcctgaccttgtgatccgcccgcctcagcctcccaaagtactgggattacaggcatgagccaccatgcctggcccagggattacatttcaatgtgagatttggaagggacaaacatccaaactatatcacacgtcccatcagggactgagatactgaggaagcttcccaggtgccaagctcaagacttggctcaagatttggttctgccatcaaggaggccatcaccagaaattgattttcttcatgctacacatacttccatccctctgtagcaagcggaatcagttgattgagggatttttcacctattttgttcgtggtcccaaggcccctgcttttaatcactatgctatggttgccgttaaggtattttaaaagtcaggcctaagcaaatgaaatagaatatttatcaaacttctttttttgttgttgtttttgaggcggagtcttgctctgtcgccaggcaggagtgcggtgccgcgatctcatctcactgcaacctccgcctcctgagttcaagcgattctcctgcctc[136 bp omitted]gcctcccaaaatgctgggattacaggcatgagccaccatgcctggcctatatatagttttttaagacaatgtagagaggatacaaaatatttatctgtagccataaaaaagaacgagatcatttcctttgcagtgacatggttggagctggaggccattatccataacaaactaacaggaacagaaaaccaaataccccatgttctcacttataagtaagaactaaatgatgagaacacatggacacacagagtgaaacaacacacattggggcctattggaggacagagggtagggcgagggagaggaccaggaaaaataactagtgggtactaggctaaatacctgggtgatggaataatctgtacaacaaacccccatgacacaaatttacctacctaacaaacctgcacatgtacctctgaactaaaaataaacgtcaaaaaataaaaaaaagaacaaaatatgtatcaagagagaagggaaaaactaagataaacatttggaccactgagaaaggttgatagaaggccccagtgtctgaggtcaggatcagtaatggtgtccttccctagcaatttctcatctgcacatgtgatgatgatgacgaccttgataacagctgatgttatgaaacacgtacaatgagcaactactgtgctcaattcttttgaaaatcagttggttttttttttttttttttgagatggagtcttactctgtcgcccaggctggagtgcagtggcatgatctcggctcactgcaagctcctcctcccgggttcacaccattctcctgcctcagcctcctgagtagctgggactacaggtgcccgccacc[172 bp omitted]cccagtgcaatagggcctataattattctcattttgcaggtgaaataatggagtcattcagtcacttgcctcagatcatgtggttggtaaatggtagagccgagatttgatcccagatcctcttgtacctgagtctgtgctctcagcccctgtggagcccccccactgagagctctgttgaaggacagatcccaagatccccccagagaggctggggctgagcccaggaacctgcctgtggcctggctggaggtgattcaagatggcagatgtgggggaagctttctgacccaccgctctcccttcttaccaggattctgcaggagaactgtgaaataccatgatggttttctctatcagtagggagcttgctgtcctctctgcatctgaccttctttctctaggagttcttagtttctgtagctttcactattctcctccttctcctcctccttctcctccttgtcctcctccttgtcatcctccttctcctcctcctcgtcatcctccttctcctcctcctcttcatcctcctcctccttctcctcctcttcctactcatcctcctcctcttcctccttctcctcatcctctttctcttcctcctcctcatcctcctcctgctcctgctcctccgccttctcctcatcctacttctcctcttcatcctcctcctgctcctgctcctccgccttctcctcatcctacttctcctcttcatcctccttctcctcttcctcctcttcatcctcctcctcctgctcctgcttctccgccttctcctcatcctccttctcctgctcctcctcctcctgctcctctgccttctcttcatcctccttctccttctcctttcttcttctttgagacaggatcttgatctgtcactcaggctggagagcagtggcgcgatcatggcttactgcaccctcaacctcccaggctaagccatcctcccacctcagcctctcaagtagctacagatgcatgctatgctcggctaatttttatatgttttgtagagatggggtttcgccatgttgcccaggctggtctcaaattcgaaggcttaagtgatcttcccacctcggcttcccaaagtgctgggattacaggcatacaccactgcgcttggcctcacttatttccttccttcctccttccttccttctttccttccttcctttcctttccttttctttccttccttcctttctttccttccctttctttctctctctctttctctctctgtccctccctcccttccttccttcttttcttccttccttcctccctctcttttctttctttctctatctccttccctccctccctctctccctccccccaacccttccttcctcccttctgagacaaggtctcactctgttgcctccgctgaagtatagtagcttgatcttggctcactgcagcctcaacctcccagtgtcaagtgattctcctgcctcagcctcctgagtagctgggactgcaggtataaacacacctggctaatttttttttttttttctgtagagatggggtttcaccatgttgcccaggctggtgttgaactcctgggctcaagcaatctgctcaccttggcctcccaaagtgctgggatttcaggcttgagctaccacgcccagcctcacttttttttctttttttttaaatggcagctttattgagctgtaatccacatatcataccgttcacttacttaaggtatacaattcagtgcttcttggtgtactcacagaattgtgaaatcatttccacaattcattttcaaatattgtcatcactccaacaagaaactctgtacatgcttagcactgcttttcgttttcccagccctaggccaccattcatgtacctgctgtctctgggtttgcctgttttgcacacttcacataagtggagccatgcactctatggtcttttcttcttcttcttctttatttttttattttttgagacggagttttgctctcgttgcccaggctggagtcaatggcgcgacctcagttcaccacaacctccgcctcccgggttcaagcgattctcctgcatcagcctgtcaagtagctgggattacaggcatgcgccaccacgccaggctaattttgtatttttagtagagacggggtttctccatgttggtcaggctggtctcgaactcccgacctcagctgatctgcctgcctcggcctccccaaatgctgggattacaagcgtgagctagcgcgcccagcccgtttctactttaatttttttttttttttttttagacagggtctcgctctattgcccaagctggagtgcagtggcatgttcatggctgactgcagcctgggcctcctgtactcaagtgatcctcccatttcagcctccccagtagctgggactacaggtgcttgcccctactactggctaaatttttatttttatttattttattattattattattattatttttgagacagagtctcactctgtcgcctaggctgcagtgcattgcaacctctgcctcccaggttcaagcgattctcccgcctcagcctcccgagtatgtgggactactggcatgcgccaccagacccggctaatttttgtatttttagtagagacagggtttcaccatgttggccaggctggtctcgaactccctacctcaggtgatctgcccgccttaactcccaaagtgctgcgattacaggcgtgagccaccgcgcccgatccgggtatatttttaaaatattttttgtagagatgaggttttgccatgttggccaggctggtctccaactcctcggctcaagcgatcaatccacctcttgaccggagatttcagaggtcagaggttagatacaagagtcaaaacccaagaaattagctctgggcagactgagtttcgggtcaggcagggtgagatgtgccaagccaaaagtctcgatgatggtggagatcaggactcagaggtcagagtgaggcctcctcccttctcttctcttcccccacaggacggcggacccagccgagaagacgccgctgggggtcccgcgccagtcgggccgtccgggttgctgcgggggccgctgcggggggcgccggtgcctacgccgctggttccacttctggggcgcgccggtgaccatcttcatgggcaacgtggtcagctacctgctgttcctgctgcttttctcgcgggtgctgctcgtggatttccagccggcgccgcccggctccctggagctgctgctctatttctgggctttcacgctgctgtgcgaggaactgcgccagggcctgagcggaggcgggggcagcctcgccagcgggggccccgggcctggccatgcctcactgagccagcgcctgcgcctctacctcgccgacagctggaaccagtgcgacctagtggctctcacctgcttcctcctgggcgtgggctgccggtgagtgccccggggccttggaaccctggcccctggccacctctcatccttcctgcccactcccggggtctccactcccggcttccccgcagctgggcagcaggtcaagccaaccctgctgattgagaacccctcttaggaaagtcgggcatgacgattgccccagggtaattggctggcacctggagatctggcttcagggacggcaggattcaggagaaaaccccactgtccgccactcagcctctgctgctatttattgctaggcctgaagtttaacagatatttatgggagcgccccgacctgggtgccaacctcacctcctcccttctcttcctccacatagctcgttggtcccaggccccttgccctcctgcccccgactttttctttctttcctttttttttctttctttctttctctttctttctttttctttctttctttctttctttctttctttctttctttctttctttctttctttctctctctttcttttctttctttctcttttcttttcctttcttttctttttctttttctcttttctttctctctctctccctctgtcctctgcccctctgcctccctccctccttccttccttccttccttccttccttccttccttccttctatgcttccttccatccctccaagctaagggtttaacccttgccctgcctgcattatggagtatcctgcattaggatactcctccttttgaggagagcaaacagaaaagtttgtggatacaacctggtgactggttttttgtttgtttgtttgtttttgttttctttcttttcttttttttttttgagccagagttccgctgtgtcgcccagactggagtgcagtggtacgatcttggctcactgcaacctccacctcctgggttcaagcgattctcttgcctcagcctcgtgagtagctgggattacaggcatgcaccactacacctagctaaattttttttgtattttttttgtagagatggggctttgccatattgaccaggctggtcttgaactcttggcctcaagtgatccactggccttagcctctgaaagtgctgagattacagatgtgggtcaccgtgcctggccaacaacctggtgactgtttacaagggacctgacacatcctgaatggttgacagtgatgacagtgatgatccctactcaagcttttcccagtagacacgctgagaggcaggcttcctctaagctatgttagcagtgttacaaagtgattcaacataaataatttattcaagcagggagcaagatatgagagttttgcagaacactaatacttctgtttgtaatttgttgtattttgtataaagtgacttttgagatgaaagggctaaggccatatgctaccatgctctaggattgccagtgatattttggacagtttatcaagcctaccactttccaggtgaaaaat[144 bp omitted]tctactaaaaatacaaaaaattagccgggcatggtggcaggcgcctgtaatcccagctactcgggaggctgaggcaggataattgcctgaacctgggaggcggaggttgcagtgagccaagatcatgccactgcactctagcctgggtgaaaagagcaaaactctgtcaaaaaaaaaaaaaaaaaaaaaagggagaaatgtctaatcatctccggaattgaatggatgaatcatcctttgtttcgccagttccctctagatggacatttaggttctctctttctttctttttttgttttaaatagagacagggtctcactctgttgcccaggctggtctcaaactccagggctcaagcaatcctcccaccttggcctctcaaagtgctgggattacaggcgtgagctactatgctcagccttctgtttttttattattccaaaataataaaagtttacatcccagatgtaaagtttatgggtcaaagggtacatttatttttgacatggatagatttccttctaagtagcttcactcatttccacacctgccatcagggtaagagagtgcccccttgaggccatgctcgacaatgcctgatactttcactctaaaatgtagctctcaatttaactgaaaaaaaatttgccaatttaatgggtaaacatgacctctccttgttataatttatgcactcttgactaccagataggttggacatcttttcctaagcttaatggccatatgtccttgtgcccccttgttttttttttggtttttgtttttgtttttgtttttgagacggagtctcgctctgtagcccaggctggagtgcagtggcgcgatctcggctcactgcaacctccgcctcccgggttcacgccattctcctgcctcagcctactgagtagctgggactacaggtgcctgcctccacgcccggctaattttttgtattttgtagtagagacggggtttcaccgtgttagccaagatgttctcgatctcctgaccccgtgatccgcccgcctcggcctcccaaagtgctaggattacaggcgtgagccactgcgaccggccaccctcccgtttttttaattggggttcattgatttgtatatgtataaatgtatatactccttatactctggatcctaatcctcggtagttttgttggtcttaatatcttcatatcttctcgaagtctgtggcttgtc[145 bp omitted]gatgcaaaataggggtagaatttttattttccccataggaattattgatgtttactggccgtttgaacgtcctctgtgaattgtacgtggtatcctttatctggcttccttccttttgcgtattagtttgtaaggactctatatgttttgccttttataggttggacagatattccggcagtttttccagcttgattcttacagggaccagctctttgctaaggccatcgttcattcagtcattacttaataggcgcagccattttaaaaatgggtgccagggccctgcatggaccagcttggtactgaataaatttgagtaaaccccgggtgactgggagggtcctggtcctgcccggtggaggctgcagcttcctctgaaggatggcattgggaagacttccattttccttggcgtcttgtgacacttgacccttgtggcatctccccacaccccaggctgaccccgggtttgtaccacctgggccgcactgtcctctgcatcgacttcatggttttcacggtgcggctgcttcacatcttcacggtcaacaaacagctggggcccaagatcgtcatcgtgagcaagatggtgaggcaggggcggggccaaagtgggcggggacatagggaaaggggtggggccagggagggagtggtccgtggagaaggggcgtgactttggggagcaatggggcgtgtttttgggatataggggtggggccagagtaggaaagggcggggccagactcagccacatctccccacagatgaaggacgtgttcttcttcctcttcttcctcggcgtgtggctggtagcctatggcgtggccacggaggggctcctgaggccacgggacagtgacttcccaagtatcctgcgccgcgtcttctaccgtccctacctgcagatcttcgggcagattccccaggaggacatggacggtaggggggatgacggcctgacagccttcctctgagtctctgtccccgctccctgggtctctgtcctcctggctctaagaaaatatctgtctctctgagtctctgtctccctctttctctggatctctgagtgataccctatattccccatcatcatctctctgggtctctgcctaccccaccccctctgtctttctgtctgtctttcttttttctttttttttttctttttttttgagatggatgttagaaatgtttattttgtggtgtcgtaaagaaatagtacttgaacataaatttaatttttttagtaaagccatttttattttttgtagaaagggtacactcgccagcagttttgtcatgagagtacacggaacaaaggagatagggtcatttataacctgacgcgtctattttactgctgtgtctggtttttattggctggaaccggactttacattttgtatttgtcttgattggctagtaacttagaagtttttaaaagaagcgaaggcagaggagaacaaaggaaggaggaagtaacttgtggaatgttgagaaaggtaaaaacacttttaaataaggaagaggaacaggctatgatctaatgcttgcttgaaccagtataagtatgtcagggcaaatatttaggctaaattgtgagagctaagaacataaagtacattgatttattttttatggctagtagatatttaagaatgttagcacaggtgtttgaataaattttgtttctaagagaagttactatttattgttaattagatggggaggaaagtctttgaagaggaacctgtactttactttttacatggagttttgctcttgttgcccaggctggagtgcaatggcacgatctcagctcactgcaacctccacctcccagatcgaagcgattctcctatctcagcctcccgagtagctgggactacaggcgcgtgccaccacgcctggctaacagttttgtgtttttagtagagatggggtttcatcacattggtcag[132 bp omitted]tctgaatgtctctcttcacagtggccctcatggagcacagcaactgctcgtcggagcccggcttctgggcacaccctcctggggcccaggcgggcacctgcgtctcccagtatgccaactggctggtggtgctgctcctcgtcatcttcctgctcgtggccaacatcctgctggtcaacttgctcattgccatgttcaggtgaggcctgactgctctctgatctgaccccacccagcatgacccgtggccctctcatgactcttgaaccccgtctaatgaattctgtttttagtccctgaactctgatccaatctaatgctgccttctccccaaacccaaccagaccctgcttgtaatttggactttggactgatcctctccctgagcccaggttgaacttccttatttgtatttttttgagacagggtctcactctgtcgccaaggctagagtgtggtgatgtgatcgtagcttactgcagcctcgacctcctggactcaagcaatcctcctgccttcgccccataagtagctgggactacttaaaattagccaggccagcaggcctgcctaatttaaaaaaatttttggagagaggggtctcactatgttgtccatgctagtctcgagctcctggactcaagtgatcctccctcctcagcctcccaaagtgctgggataatctgtcacctaggctggagtgtagtggcaagttctcagctcactgcaacctccacttcccactcccccatacccagttaattttttgtatttgtagtagagatagggtttcaccatgttggccttgaactcttgacctcaagtgattggcccacctcagcctcccaaagtgttgggattacaggtgtgagccatcgcgcccagccaactttgttttttattgtggtaaaattatataaaattttccatttttacttctttttttttttttttttttttgacggagtctcgctgtgtcacccaggctagagtgcagtggcacgatctcacaatctcagctcactacaagctccgccacccgggttcacgccattctcctacctcagcctcctgagtagctgggactacaggtgcccgccaccacgcccagctaatttttttgtatttttagtagagacggagtttcaccgtgttaacccggatggtctcaatctcctgacctcgtgatccacccgccttggcctcccaaa[132 bp omitted]tctcctgcctcagcctcccaagtagctaggactacaggcgtgcgccaccacacctggctaattttttgtatttttagtagagatggggtttcaccgtgttagccaggatggtttcgatctcctgaccttgtgatccgcccgccttggcctcccagagtgctgggattactgacatgagccaccgcggccggagttgatttttaccatttttaagtgtacaagtcagtgacattaattacatttacagtactctccaaccatcaccactatctattttcaatacgttctatcacccagaacagaaagtgtgtccccatgaaacagcaactccccacttcccctccccacaggtcttagtaacctccagtgtattttctgtctctatggatttagtctagatgtttcatgtaagtggaattatgcgatatttgtcttttggtgtctggctgattttactgagcatgttttcaaggctcatccctgttgtagtgtgcatcagaacttcattcattccgttttatgaatgagtaatattctattgtacaaatagaccacatttgggcccagcgtggtggctcatgcctgtaatcccagcactttgggaggcctaggcgggtggatcacctgaggtcaggagttcgagaccagcctggccaacgtggcaggaccccctttttactaaaaatacaaaaattagctgggctcatgtctgtaattccagctacttgggaggctcaggcacgagagtcgcttgaacccaggaggcggaggctacagtgagccaagatcgtgccactgcactccagcctgggcaacagagcgagactccatctcaaaaaaagaagaccacatttgatttacccgctcatctgttgatgaacacttgggttctttctgccttttggctattgtgactaatgtttgttggaacattggcatgcaagtatctatttgaatccttgtttttatttcctttgggtgtgtatctcaaagtggaattcctcggtcatgtggtaattctatgtatagctttttgagaaaccaccaaactggtttccacagcagctgcaccattttccattctcaccagcagtgtatgagggttttaatttctccacatcctagccaacacttgttattttccttttgtaaaaattatagtcatccagctgggtgtagtggctcatgcctgtaatcccagcactttggggggctgaggtgggaggattgcttgagcacaagagttcgagaccagcctgggcaacatagcgaggctgctgtctctaccaaaacaccagaaatgagataccacttcacacctgcagcctcaacctcctgggctcaagtgatcctcccacctcagcctcccaagtagctgggactacagttacgtgccaccatacctggcttgtttttttaattttttttttacttttattttatttatttatttttagtagaaacggggtttcaccatgttat[135 bp omitted]tgttaggtctctctgtttgcttcctttcttgttggcatgatttttgctgagaaaatataaaatttcattggctttggttgtttttttttttttttttttttcagagatggggtcttactatattgcccaggctgatcttgaacccctgggctcaagcagtcctcttgccttggccttccaaagtgctgggattataggcacaagcccctgtgctggacctattgtattagtttcctagggccgccagagtaccaaaaactgtgtggctttaaatcacagaaattgtctcacaattctggatgctagaggtccaaaatcaaggcatccgtcaagctgttttcttctgagggatgtcggggagagtctgttccatgcccctcctgtcacgtctagtgctttgctggccatctttggcttctagttgcgtcattgaaacttctgctttcatcttccagatttccccttttaataaaacgttacttaaattggattagggaccatgctaataacttcattttaacttgatcacatgtgtaaactctatttccgaataaagccacatatttcataaataaaaaatttaaaaaggtctcattctgaggcactatgggttatgacttcaacttttttttttttttttttttttttttggagacagagtcttgctctgtcacccaggttggagtgcaatggcgtgatctcggctcactgcaacctccacctcctgggttcaagggattctcctgcctcagcctcccgagtagctgggattacaggtgcctgccactatacacagctaatttttgtatttttagtagggacggggtttc[131 bp omitted]aattcaatgcatgacactcatagatttatgagtttatttctggactttcaattctattccactggattgcgtctatccttatgccagaaccacacagttttttgggttttttttgagacggagtctcgctcttgtcacccaggcgggattgcagtggcacgatctctgctcactgcaacatccgcatcctggattcaaacgattctcctaactcagcctcctgagtagctgggattacaggcacctgccaccacgcccggctaatttttttgtatttttggtagagacagggtttcaccatgttggccaggctagtcttgaactcctgacctcaggtgatctgcctcggctttccaaggtgctgggattacaggcgtgagccaccatgtctagcccacacagtgttgattactgtaggtttgtagcaaattttgacattggaagtatgagtctcctttgttatttttcaagattgttttggctattctgggcctcctgcaattctatatgaacttaaagatcagagtttccatgtctgtcaaaaaggttgttggaattttctttttttttccttttttttttttcttttttttgagacagagtttcactcttgttgcccaggctggagtgcaatggcgcgatctcagctcaccacaacctctgcctcccgggctcaagcgattctcctgcctcagcctcctgagtagctgggcttataggcatgtgccaccacgcccggctaattttgtatttttagtagagacagggtttctccatgttggtcaggctggtctcgaactcccgacctcaggtgatccacccgccttggcctcccaaagttctgggattacaggtgtgagccaccgcgcccggccagttgttggaattttccgagggattgcgttgaatctgtagattgcttcgggtagtattgatatttcatctaggtgttctttttaatgcttttccagcagtatttggtagttttcaggctacaaattgttcacccttttggttaactttattcctaggtgcttaacctttagatactgttgtaagtggaattgctttcttaatttcctttttggattgttcattgcgggtgtgtagaaacacaactgatttttgtgtgatcttgtaccctgcaactttgctgaatctgcagccctagaagctttcttgtgattctctggcatttcctatatataggatcatgtcatctgtgaatagagatatttttacttcttcctttccaatttggatgccttttattttttttcttgtttaattgttctagccagaacttccagcacaatgtggaatagcagtggtaaaagtggacatccttgtcttgtccctgatcttaggcagaaagctttcactctttcaccattgggtatgacggtagctgtgggtttttcagaagtaccttttctcatgttgagaaagtttatttctattcctagtttacgatttttaaaaattatgatgcatggtggcttgtgcctgcaatcacaatactttagggagccaaagtgggaggatcacttgaggccaggagttcaagaccgacctgggcaacatagtgagaccttatctcaataaaaaaataaaaaatttgccaggcgtggtggtgcatgcctgtagtcccagctactcaagaggctgaggtgggaggaaggcttgagcccaggaggtcaaggctgtggcttcagtgagccatgatttcaccaccatcatgattgtgccaccaacagagtgaaaccttgtctcaaaaaaaaaaaaaaaaaaaaaaagccatgcatggtg[131 bp omitted]tgcagagacaagagattgtagaaatgaagacacaagacaaagagatcaaagaaaagacagctgggcctgggggaccactaccaccaagacgtggagaccgacagtggcccctaatgcctggctgcgctgttatttattggatacaaagcaaaaggggcagggtaaagagtgtgagtcatctccaatgattgataaggtcacgtgagtcacatgtccactggacaggggcccttccctgttaggtagccaaggcggagagagagaggacagcttacatcattatttcttctatgctcttttaagaaagatcaaagactttaatactttaatactttcactaattttgctactgctatctagagggcagagccagctgtacagagtggaacatgaaagtgaaacaggagtgtgaccgctgaagcacagcatcacagggagacggttaggcccctggataactgcgggcgggcctgacatcagtcaggccctccacaagaggtggtggagcagtcttctctaaactcccccggggaaagggagactccctttcccggtctgctaagtagtgggtgcttttccttggcactgacgctacctctagaccacggtccgcttggtaacgggaatcttcccagatgctggcgttaccgctagaccaaggagccctctggtggccctgtccaggaataacagaaggctcacactctgtcttctggtcacttctcatcatgccccttcagctcctatctctgtatggcttggtttttcctaggttatgattgtaaagcaaggattattataatattgaaataaagagtaattgctacaaactaatgattgatattcatatataatcatatctatgatctatatctagtataactcttgttattttatatgttttattacactggaacagcttgtgccctcggtctcttgccttggcacctgggtggcttgccgcccacacatggtgaaaccccatctttactaaaaatacaaaaagttagctgagcgtggtggtgggtgcctgtagtcccagctactcaggaggctgaggcaagagaatggcatgaacccaggaggcggagcttgcagtgagccgagattgtgccactgcactccagcctgtgggacagagcaagactccatcaaaaaaaaaaaaaaaaaatcgtgaagtgttgttgaattttgtcaaatgccttttctgtgttggttgagaagatcatatggcttcccccacaccttgttctattaatttggtgtttgcattaatttttgtatgtttaactacccttactttcctaggataaatcccatttcgttatggtataaaatccacttaatgtgctgctgaattagatttgcttgtattttttcaggatgtttacatgtatattcataagggctactgctctgtaattttcttgtgatatctttatctggctttggtattacggtaatgctggcctcatagaatgagttaggaaatgttctctccttttcaatcttttggacgaatttgagaaacatccttgttattataattcttctttaaatatttgatagaattcaccagcacagccatctggttttgggcttttctttattgaaacgtttttgattcaatctcttatgataattctactgagattttctgttttttcttgagtcagcttagctaatttgtgtgttcctaggaatttgtccatttcatttatctagtttgttgacatataattgttgatagtattctcatacaatcctttttatttcggtaaggtcagtagtaatgtctccattttcatttctgatgttagttatttgtgtccaggctaactttggagcccaactttaacctgacttcaacctccaccttataccgtgataccatcccaacttgacctctgacatctgacccttggcccttctaaactgactttttttttttttttttttttttgagatggagtcttactctgtctcccaggctggagtgcagtggcacgatctcagctcactgcaacctccacctcctgggttcaagcgattctcctgcctcagcctccccagtagctgggattacaggtgcccaccaccacgcctggctaatttttgtatttttagtagagatggggcttcaccatgttagccaggctggtctcgaactcctgacctgaggtgatccgcccactccggcctcccaaagtgctgggactacaggcgtgaccaaacgcccttggctctaacctgacttctaatcgcatcctgtaacctctgactttagtgatcttgacttctgtctgctgctatagactgaacaattattgcctggcatctaaccttcgtccttgcccctggctgggccctgacctcaagtgacctttgacctctggcctttgcagttacacattcggcaaagtacagggcaacagcgatctctactggaaggcgcagcgttaccgcctcatccgggaattccactctcggcccgcgctggccccgccctttatcgtcatctcccacttgcgcctcctgctcaggcaattgtgcaggcgaccccggagcccccagccgtcctccccggccctcgagcatttccgtaagaacagagcttggcttaaaaaggagaaatataggggaccgggagcctggaaggcgaggggaagggggcatgccccaaatgactaacgggcgtggcttaggtagcgaggggcggggtttaagcaacaaggggcggagcttaagcactgaggggcagtgcttacgggtgaggggcggggcatgttctcgaatcaccaggggctgggtctgggatagcgtgcgtgttctgagggtgtcggaaggggcagctgggattgggaaggggcgtggcctgagccctttgactccgcccgcccctgcaggggtttacctttctaaggaagccgagcggaagctgctaacgtgggaatcggtgcataaggagaactttctgctggcacgcgctagggacaagcgggagagcgactccgagcgtctgaagcgcacgtcccagaagtgagagcggggcctggtcggggatggggcttctggcctggggcggatcctgacttcagctgaaggcagggtcctgggagggagggagagagggaggaggcccgggaagcaggcagagccctgggggtgggtgggctgcgggtgcccccggtaagaggccctcccttctcagggtggacttggcactgaaacagctgggacacatccgcgagtacgaacagcgcctgaaagtgctggagcgggaggtgaggccttggggcctggctgggggactgtggcaggggtcccatctcccgctctgacattcctcccattccgcaggtccagcagtgtagccgcgtcctggggtgggtggccgaggccctgagccgctctgccttgctgcccccaggtgggccgccaccccctgacctgcctgggtccaaaggtcagtgtgtagcatcagcctgtgcatctccagcctctgttcctgtatttttgcgtgtttttctctctcggcacctttccagtgtccctgggtcactctcttggtctcctttgagccttttgtactctcgccttcgtctttcttcttttttgccagtctcccagtttttctgtctctccccttccctgccaatcacctgctctctcttttctctcttcccccagactgagccctgctggcggacttcaaggagaagcccccacaggggattttgctcctagagtaaggctcatctgggcctcggcccccgcacctggtggccttgtccttgaggtgagccccatgtccatctgggccactgtcaggaccacctttgggagtgtcatccttacaaaccacagcatgcccggctcctcccagaaccagtcccagcctgggaggatcaaggcctggatcccgggccgttatccatctggaggctgcagggtccttggggtaacagggaccacagacccctcaccactcacagattcctcacactggggaaataaagccatttcagaggaatcgtgtccggaggcttgattcctgggggagctggtgggtgtctagatccaggatgggagctggagctggggtgttgggtttggggttcttggtggatttgctgctgtaattcagatattttggagtccgtttcctcccttgagccccattgttcttgccggagacccagcacttctgtctgcactgttctgacggctctcgcttcagtaggacaagaccccatctgtaccccctcccacccagtttcaactttccagtggaaaaataactcagtgataataagcaaattatttcctggaatggaggtgggtgggtgttgtgtacatctgctttggcaatagggaaacggatgatgcaaatttgagtagataaatgcatacgtgtctttaaaaagtctaattagtgggaaattgcaggccaggcgcacacagggttgaggcaaatatgtgtgattatacatgcagcttaactaaataacccataacaagctaaactggtaatgacaaggttgaactgacagcaatcattagttaaatagcaagaaagccaccaacaaccaacacatccaaaaatcaaaaccaaacatccttcctccaaattggaggagatccaagtatctgtcaccgtgggtgcagagtagcgttgaaacattgccaagtgttgtgtggcaactgcaacttctctggaagatgctgagttagttctcaccaacccaagtagtaataatcactgtaatgtaacctacttccttccttccttccttccttccttccttccttccttcctccctccctcctttcc[134 bp omitted]cctccgcttcctgggttcaagcagttctcctacctcagcctctggagtagctaggattacaggtgcccgccaccatgcccggctaatttttgtatttttggtagagacggggtttcaccatgttggccaggctggtcccaaactcctcatctcaggtgatctgcctgcctcggccttccaaagtgctggaattacaggtgtgagccaccacacccggccactttttcttcttttctttcaataaggtctcactctgtcacccaggcagaaatgcagtgactcaatcacagctcactgcaacctccacctcctgggctcaagcaattctcccactcagcctcctgagtagctggttctacaggctcacaccaccatgcccggctaattttttggatttttggtagagatggggtctcaccatattgccctggctggtctcaaactcctggggtcaagtgatccactcacctcggcctctcagagtgctgggattacaggcgtgagccaccgtacccggcctccagtactttctatatatgtgtgtccagcattgttttaagtgcttcacgtgcgctacatcagtgaaccctatgataaccatacaaggtaggttctattattgtctccattttgcagatgagaaaagtgagacacagaaaagtagctcaaataaagtcacacatagaaagtagctgagttgggggttgggcgtggtggctcatgcctgtaaaacagcactttgggaagccaagcaagtggatcacttgaggccaggagttcgagaccagcctggccaatatagcaaaaccccatcactactaaaaatacaaaaattagccgggtgtggtagcggacacctgtagtcccagctactcgggaggctgaggcaggagaatcacttgaacccaggaggcggagattgcagtgaaccgaaattgtgccactgcactccagcctgggtgacagagcaagactctgtttcaaaagaataataaaaaataaaaatggaaagtggctgcgttggaacagaaatctgggcaatccagagagcatctgtaatgcacgattttatatttggaaatgtcaactgccgtgaagtcacaggaactcactcagtccatgtgcaagtttgagcttttgtctctcagctgcaaatccacccttgcctccgctctgtgatgttggggcggagcctctgcaagccacgtttttgctttcccagctgggttgctataagccccggcctaaagagggcgctagacggagaccggccattggaggaggaagcagggatttgctccacctatttgcttcaggcatccgagcaagcgtcgccccagaacaacgctccctctgacagcagcagttgcttccaggttttttgtttgtttgtttgttttttgttgttgttgttgttgttaagacggagtcttgctctgtcgcccaggctggagtgcaatggcgcgatctcagctcactgcaacctctgcctcctgggttcaagcaattctcctgcctcagcctcctgagtagctgggattacaggcatccgccaccacgcccagctaatttttgtatttttagtggagacaggatttcaccatgttggtcagactggtctcgaactcctgacttcaggtgatccagccaccttggcctctcaaagtgctgggattacaggtgtgagccaccacgcccggccctcttccaggtttcaagttttatttttttggcacctccctaacctgtttctttttctatttctgtcgcccaggctggagtgcagtggtcgaggctcactgtagccttgacctcccaggctcaagccatactcccgcctcagccttcagaatagctgggaccacaggtgcacgccaccacacccagctaattttttgttttcaaattgtttcgtagagatgggggtctcgccatgttgcccaggtgggtctcaaactcatgggatcaagggatcctccaacctcggcctcccaaagtgctgtgattacaggcatgagccaccacgccggatgccataaccagcatcattgtcagccttctgtcacaccagcgccaccctggtagcccctggctctagtctgggtttcagttctgcagggctgctgcctcaacattttaggttctgatagctgtattctcagtcctggagtgacaggtgtagcctgcagttactatttttatacggtgcagttactatttctgcgctgtttcttctcattcctttcacggtttcctgagacctgtttaatttatctgagacccgtgtattaattcatctctgttgaagtatctatataacaggaaaactccaggtcgtgtgtgtagaaatctgacgtgagtcatcaagatggagaatttgcacgaattccacatgtaaagcgatttggagaccaaaaattccttaattgaagaggaggctggtactcttgaggaattaccctaaaataactgctgcaagcttatattttgcatcttccattcaaataggacttgtctccgtttatgcagtaactgtgtattggggaaaggaaaatactcagaccttttagggattagcagacactggcccggcctatttattcatttttgagatgcagtctcactctcttgcccaagttcgagtgcagtggtgtgatcacagctcactgtggcctggctcaagtgatcctcctgcctcggcctcctgagtagctgggatcacaggtgcacgccacca[133 bp omitted]gaaaccctgtctctactaaaaatgcaaaaattaaccgggcatggtggtgtgtgcctgtaatcccagctactaggggggctgaggaaggaggatcacttgaacctgggaggcggaggttgcagtgagccgagatcatgctgcactccagcctccgcaacagagcgagactccatctcaaaacaaaccaaaaaattggtctttaataattttttatttttgagacggaatctcgctctgtcacccaggctggagtgcagtggcgcgatttcagcttaatgcaacctccacctcccgagttcaagcgattctcctgcctcagcctcctgagtagctgggataacaggtgtgcgccaccacgtctgacaaatttttgtatttttagtagagacagggtttcaccatgttggccaggctaataaagttttaaaataaaaaaataaaagaaaaaagaaaaatacaccacatttgaggtattttccaacccatttagtgagtaacctacaaaaatgccaactcggagtgtcgtccaagtgcgtgagaaggctctgcatccggctgatgctgagcttaagctcagtcttgtgactcagcagctcacatgatactcagaaaagaatgtggcaaatcgagatgctgtatgacctccagaaagtgccaataggagcattttccggcataaactcgtagggttttggcacaaagccatgccatcttctgcacacaactcatctctgtgaagaaacaattccttgtctcggttagagatagatacctggccatggagcaccgagcaatgataaaacctgagctgaccatcaggaactcggtgtaatccgacccacaaatccagaagattgagcacaggcaatggcagtgcatcaggtggaaataagaaataaagtgttggccgggcgccatggctcactcctgtaatcccagcactttgggaggccgagacaggtggatcacctgaggtcaggagttcgagaccagcctggccaacatggagaaacccccatgtctactaaaaatacaaaattagacaggcatggtggcgcatgcctgtaatctcagctactccggaggctgaggcaggagaattgcttgaacctgggaggcagaggttgcggtgagctgagattgcaccattgcactccagcctgggcaacaagagcgaaactccatctcaaaaaaaaaaaaaaaaaaaaaagaactaaggtgttggcataagcaatgacacaagcaaattgcttgagtggacagcacagaccgttctgccatctatacccactgttttgtcttctctccatttatacccatggcttcatggacagctcctcatgactttttttcttttctttctttctttttttttgagatggagtcttgctctgttgctcaggctggagtgcagtggtgcgatcctggctcaccacctctgcctcccaggttcaagtgattctcctgcctcagcctcccgagtagctgggactacaggtgtgcaccatcacgcccagttaatttttgtacttttagtagagacggggtttccccatgttgaccaggctggtctcaaactccagacctcaggtgatctgtcctcctcggcttcccaaaatgctgggattacaggtgtgagccaccgcaccaggcagctcctcgtgattaattgaactggggaggacacaactttgggctggtttttagatggctcagcatgatatactaggattctcagagtcagccacattgcagccctcagaggaaccagcactagcctggcagtctcccttcccagaaatctgagccccagctcagcaatgcccacttctgagctgggcagcaaccctgagcaaccaatctcaagagccctgaggttcatctgatcctctctttggtaacatagcaggattggctcagcaagcctgcgctgacgccacagatacagaagaacaggctgataccagctgctgagccccagaggctgcccttttctagccagaacattttttctgaccaggaagctgtcatcgccacatagctgtttctcctcttccccgattctataaatacaaaaacacagtccttctttactgggatgctgctggccacggtgcaggcagaccgttcatgtttagccggagtcacgggctggagggatgctccctcctctacctgtgcgtcttccctcagtgaatctattcctgtctctatcacacaggcctagtggtgtgtgtgacagttggtgaccacagaggaaaattctccatctgtcctgctgccgtgttctttttgtttgtttgtttttagacgaagtcttgttctgttgcccaggctggagtgcagtggcgcgatcttggctcactgcaacctccacctccccagttcaagggattctcctgcctcagcctcctgagtagctgggattacaagtgcccgccaccatgcccggctaatttttgtacatatatatgtgtgtgtgtgtgtgtgtgtgtgtataggtatatacatatatatatgtatatatacacatatattcgtatatatgtgtatatacacatatattcgtatatatgtgtatatacatatatatttgtatatgtgtatatacatacatacatatgtatatacacacatatgtatgtatgtatgtatgtatatatatatatatgtattttttttttctgagactgagtcttggtctatcacccaggctggggtgcagtggcacaatcttggctcactgcaacctctgcctccccagttcaagccattctccagcctcagtctcccgagtagctgggactacaggcgcctgccatcacgcctggctaatttttgtatttttagtagacacagggtttcaccatgttggccaggctggtctcgaactcctggcctcaagtgatccgcctgcctcagcctccgaaagtggtgggattacagatgtgagcctgtgagccaccacacccagcctggtgctgtgtttgcaagcaacatggagtttggcccactatggaggtggaagacattccctcctaatggtggtggcaggtcacatgtaaggccagtgagtaaactggatgtccatgaagccagggtgggcagcagagctgtggtcagctagtgcagtgtactctggagaggctgctgacggggtggggatggctgtggtgtcccctcacccgggacctggtgaggccccctaagatgctgtctgttccaggtctcaggtgcagggaaagacagatgactgtaaacagaatgtgtaagacaccagaggcccccagacaagcaagtcatttgaaaaacatggttcattgtatacaaaaagaaatctctaggtagcggggctgcaggttttcagaggaaaggaggcaggaggctgggatgagggctaaagagtgcagatgcaaattacaaaattaaccgagtgtggtggtgggcgcctgtggtcccagctactcaggaggctgaggtgggaagatcacttgagcctgggaggtcgaggctatggtgagccgtcatcacgccactgtactccagcctgggtgacagagggagaccctgtttcagaaaagaaaaagacggaggccaaggaactggtaatatcaaaaggacgacgagtgtaactagagggaacggagctgtaaggttggctcaaagctgcaaccaagcaaatgggctgcggccaaaactgggatggatttgcctttttatttattttttatttttattgtatttttttgagacggagtctcactttgtcacccaggctggagtgcagtggtgcaatctcggctcacagcaaattccacctcccgggttcaagcgattctcctgcctcagccccccaagtagctgggactataggcacgcgccactactcctggctaatttttgtttgtttttgtttgtttgtttgtatttttagtagagacggggtttcactgtgttagccaggatggtctcgatcttctgacctcatgatccacctgccttggcctcacaaagtgctgggattacaggtgtgagccactgcacccggccggatttgcctttttagaacaaagacgtaggcaagccaaggggctgatacacacaaccagattaagtttggaaaaactgtgggcattggacacacgcttttgcttctcttgaatatctaggattgggatggctggatggtataggaagtgtatgtatgactttataagaaattgccaaaatcttttcctaagtagttgcaccgtttgaattttgaatttccaccagcaatgcatgagagcgttctagtggccctgatccttaccaggacctgctattatcagtgcttatgattttttgtgttttttttgagacagagtctctctctgtcacccaggctggagttagtggtgtgatctcggctcactgcaaccttcacctcccagattcaagcaattctcctgcctcagcatcctgagtagccaatattacaggtgtacaccaccacacccagctaatttgttgtatttttagtagagatggggtttcaccatgttggtcaagctggtctcgaactcctgaccccaaatgatcaacccacctcggcctcccaaagtgctaggattacaggcgtgagccaccatgaccagcaagttgtgtttgtttgtttgtttgtttgtttgtttttagcacaaagtattggctgggcacggtggcttacacctgtaatcccagcactttgggaggctgaggtgggaggatcacttgaggccaggagttcgagaccaggcttgggcaacatagtgggactttatgcctacaaaaaattttttaaaattagctaggtggggtggtgtgtgcacctgtaatcccagctacacgggaggctgaggtgggaggatcatttgagcctgcgagtttgaggctacagtgaactatgattgcaccattgcactccagcctaggtgacagagcaagactcggtctccccgccccacccccccaaaaaaaaggatcaggtaatgtgtacaagtttttgtttgaagacctgtcttcagttcttttgggtaggtacctaggggtggaatgactgggtcatatatatgctaattctgtgcttaactttttgaggaactgccaaactgttttacacagtggctggaccattgtacattctcaccagcaatgtacgggggttccaatttcttcacatccatgccaaacacttgttattcgcagtttgttttcttttctttttatttttcttttgagatggagtttagctcttgttgtccgggctggagtgcagtggcacaatcttggctcaccgcaacctctgcctcccgggttcaagcgattctcctgcctcaggatcctgagtagctggaattataggtgcctgccaccatgcccggctaatttttgtatttttagtagagatggggtttcaccatgttggccatggtggtctccaactcctgacctcaggtgatccacctgccttgacctcccaaagtgctgggattacaggcgtgaaccactgcgcccggcccagtttattttcttgatcgtagccatcctagtggctgtggagtggtgtcccattgtggttttggtttgcatttccctaaggactagtgatgctgtgttttgaccattctcacattcttttttttttttttgagacagggctggaatgcagtggcatgatcatagctcactgcatccttgaactcctgggctcaggagattctcccacctcagtctcctgagtagctgggactacagttgtatgccaccgtgcccacgtaatttataaaaaaattttagtagagacgggatcttactatgttgcccaggctggtctcaaactcctgagcacaagtgatcctcctgcctcagcctcctgagtagctgggattacagatgcacaccactatacccagctaagtttttatttttttttttttaaatagagatgggtttcattatgttgctcaagctggtctggaactcctgggttcaagcgattctcctgccttggcctcccaaagtgctgggattacaggtgtgagccactgcgcccagccttatgcgttctttggaagaaacggcttttgggtaatggcctgcactgttgtattgtatcagctgccatccagtcgaagctaactaagggcaggtgggtgttgaatgaggacaatgcccacctgcccttagttagctgtgactgcaagaacaaagaccctgttatcccaatcatcatcatgaggactagctgggccgcagcttaaagggacatttcatagcttaaaaaagacaaactgttggtcctgccacctccaactacaaaggtgttgcaactgataagccttttgggatcttgaggacgccacatctcacgtgtggaaatttcactaacgtggctgcagcaagtgaccagacagatggccgcatttgagtgggagcctctttagcaagagctttttaaaatcaagctccacccaggagctctttatcttcttcagaacccacgggattacagacatctgcaccagcccccgtgggaccttggagtccaggagaatgaataccaaggcattgatgctcatgctccctgctggctggtgagtaataaagtcccttgtctctggcccaggagtcttgtgtcttctggcaacatttgtgaaacagtaatgggctagcttgttttatttttatttttattttttattttattgattgattcattgaattagggacagggtctcactctgtcacccaggctggagtgcaatggtgcactccaacctgggctcaagtgatcctcccacctcagcctcccgagtagctgggactacaggtgcatgccactatgcccaactaattttttacattttgtagagacggtctggctacattgcccagagtggtctcgatctcctgggctcaagggatcctcctgcttcagcctcccaaggtgctgggattacaggcatgagccactgcacccagcccaggctggcttgtaagtaggacaaaatgaaagtccggacctggtagtgtggaaaaggatgggatgttgacagaggcgtggctttctggaattggaaggacagggcctccatgggcctggttcaaaaatatgagaagaatccctgggatccagtagggaattctctcatccaagtagaggaggatggccaggaatagaggtcttcactgtcctacttgtattttttttttttttttttttagatggagtttcactgttgttgcccaggctggagtgcagtggtgcaacctcggctcactgcaacctccgcctcctgggttcaagcaattctcctgcctcagcctcccgagtagctgggattacaggcaggcaccgccacgcccggctaattttgtatttttagtagagacggggtttctccatgttggtcaggctggtctcgaactcccgacctcaggtgatccacctgcttcggcctcccaaagtgctgggattgcaagcatgagccaccgcacccagcctgtcctacttgttaatgaggctcagtggctacagataggatcaaaatcagtgggcaaaacagtgggcaaatggtgcctggctgcacctgggttcttacccttctccaggcaggtggaggaagaaatgggatcatgaaaatgagacaacaagccccagggacccaaccaagaggcagcatggctgtggccgctgggtcaaagggtctctgaaaccgaagtggtatcagcaacaaggaccttgttatttgtttctttgttttgagacagggtcttgctctgtcacccaggctgaagtacagtggcgcaaacatggctcactgtagcctcaaactcccagggccaaggggtcctccccactcagcctcccgagtagctgggaccacacgtatgcaccactacacccagctaatttaaaatttttttgtagagatgaggtctcgctatgtttcccaggctggtcgtgagctcctgagcacaagtgatgcaatcacctcggcctccgaaagccctgagattacaggcatgagccgctatgccctgccttgctatttgatattgagccttcagtgggctgaaaacattagtgaagatcccaccctgcgagtgtttctggccccaccacggtccaatttggatccagtccacagctgggtgcagggctggtcaaagatgctgaggactgggagggctgagcctggccatctgtggaagagcagaaagagaggggcctctgtgcctaagaacttgctgggtcctgggaggtacctgggttgcagctctggcactgatcctggagggaggagccaagtgagccgatagagaggtcaataatgaagtttttttgttgtttgttttttgagatggagtcttgctctgtcgcccaagctggagtgcagtggcatgatcttggctcacggcaagctctgcttcctgggttcatgccattctcctgcctcagcctccccagtaactgggactacaggtgcccgccaccatgcctggctaattttttgtattttttatagagacgaggtttcaccgtgttagccaggatggtctcgatctcctgatctcatgatccacccgcctctgcctcccaaagtgctgggattacaagtgtgagccaccatgcccggccctttttttttttttttttttttttttgagatggagtttcactcttgttgcccagactggagtgcaatgacgcgatctctgctcactgcaagctccgcctcccaggttcaagcaattctcctgcctcagcctcctgagtagctgggactacaggtgtgcaccaccacacctggctaattttgtatttttggtagagacggagtttctccatgttggtcagtcaggtcttgaactcctgacctcaagtgatccgcccgcctcggcctcccaaagtgctggaactacaggtgtgagccaccgcgcccgaccaacaatgagtttttttcccctgcctttgctgtccccctgggatgccccccagccccaagttgctccagggctgaggctgtagtccctgacccacagacttcttggtccaagtacctgaattcaaccagtcaggctcccagtgggaagggaagctgaagagatctcgttgggtgtggcacctagagccaattcaatgtcccgctgtgtggtttccacgactgagcgggtgtaattggtactgatgctttacatgctcgaaaaaactacacatgccttgttatcagaggattctaccagtcggaggctgtggcatatgccgccctcttcacctctaccagaaacaatgtgggatcccagtagaaaaggaaacacaactgtaatgactaaatggctgctggagtgctccgggaagccgtttcccagtgccacagtgccacctgcctgacacggccaccaagtacactccttttaaaaagaaagggcagctgggctgggtgcggtggctcacaccaagaggtgggtggattgcttgagtccaggagttcaagaccagcctgggcgacatagtgaaaacccatctctgttttttttaaattaaaattttatttatttattttgagacagagtcttgctctgtgaccaggctggagtgcagtggtacgatctcggttcactgcaacctccacctctggggttcaagcgattctcctgcctcagcctccccagtagctgggattacaggcacctgccaccatgcccagataacttttgtattgttagtagagactgggtttcaccatgttgg[132 bp omitted]cgctatgaatcactattaagctctccttgaaagcaaacgcctggcttgtggtggcctttgactccccagcctcacacccttgttctcgggtaggttaactgcagcttcactagcaataccggaaatggccaaaggtaaagggtacgtctaagagcacagctggtctggtcctcaggtcttctgagttttacatacaaaagtcacagctacccctgtttcttctgttttctgtttcgagacggtcttgctgtgttgcccaggctggagtgcagtggcatgatcgtggctcactgcagcctggaactcctgggctcaagcgatcctcccacctcaacctcctgagtagctgggactataggcatgcgccagcatacccggttaattttttaattttttttttttccagagacagagtctcgctgtgttgcccatgctggtcttgaactcctgggctcaagcaatcctcctgccacggcctcccaaagtgctggaattacaagtgtgagccgccgcaccccgcagcagctaccccatttggagaaaactctcctccactcccctgcctgaggcaattcctctggctcaatggggccctcaattcaaacgggttcccttaaacggctgggcgcattccactatgttaaacctaaagatgtccactagggggcagcaaccacctaaccccaacaccaactccggaagacattgattgcagtttggttgatatttaaggtattcaatgggactttgtaacttcctcactatctgcgggtgtctggtattattgattgttggatcatcttcctcaagaatcagctcaaaaaggtttctggtttccccttcctacctcttcctgatccacacactttatttatttattttttgagacagatgctctgttgctcaggctggagtgcagtggtgccatctcggctcactgtaacctctgcctcctgggttcaagcgattctcctgcctcagcctcccaagtagctgggattataggcgtcaccatgcctaggtgatttttgtatttttagtagagataggtttcaccatgttggccagctggtctcgaacccctgacctcaagtgatccacccgtcttggcctcccaaagtggggggatcacaggcgtgagccaccacacccggccgcacacactttactcaggccgtttggtcactgaatgtggcagtcccagaagaggcttcatctcttcttggct[169 bp omitted]gaggcaggagaatggcatgaacccgggaggcggagcttgcagtgagccgagatcacaccactgcactccagcctgggtgacagagcaagactccgtctcaaaaaaaaagtacaattttgcccgctgaccattgttgggaatgatgcatctttctttccgctggacagcctggtggtcatgccctccagatggcagttgagtcctgagggggccaagtaggggattcaaactaatgctggtttaggcaccagaatccccttgttggaccgacatggtgctagatcaggagttggcacactatagcctgtgggatacatctggcctgtgacctgtttctgtgtggtctataaactaacaaagcttttcatatattttaaagaatgtgttgttgttgttgttgttgttgttgtttttgagatggaatctcgctttgtcgcccaggctggagagcagtggtatgatcttggctcactgcaagctccgcctcctgggttcacgccattctcctgcctcagcttcccgagtagctgggattaaaggtgcccgccaccatgcccggctaatttttgtatttttagtagagacggggtttctccatgttggccgtcctggtcttgaactcctgacctcaagtgatccacctgcttcagcctcccaaagtgctggaattacaggcgtgagccacggctcagccaagaattgtttaaaaaaaaaaaaaaaaaaaaaaagccaggtgtggtggctcacctctgtaatcctagcacttggggaggctgaagcagaaggatcacttgagcccaggagatcaagactagcctgggctatgtggtgaaagcctgtctctacaaaaaattaaaaattagctgggtgtgctggtgcacgcctgtagtcccagctactcgggaggctgaggtgggaggatcgcttgagcctgggaggtcgaagctgcagtgagatattattgtaccacagctctccagcctcagtgacagagcaagatcttgtttcaaaaagaaaaaagaaaaagatgactatgccacagaaaacaaatgccctacaaaacccaaaatactattacctggttctttccagaaaaagttggctcactcctgtgttagttgaaacaacctgctgatattacttatgtggcttaactgagacaatgtaacggtaattccagccaagcttaacaacaaaatccaatgactgtctcttctcaggttggggaggtaagctgtggcatgcccattgtggatgggggttgcttttaggctcatctgttgtcaccctgtaattgtttgtaaagacatcaaagatcagatcagtttttttatttttaaatttctttttttggtattttagcagatcagcctaaagttctctgctctgcttataatggacaatagagtcgccttagactatatcctggttgtccaaaataagatgtactggtcctctgggaccagtttttactttttttttttctgagatggagtttcactcttgttgcccaggctggagtgtaatggcatgatctcagctcgttgcaacctctgcctcccgggttcaagcgattcttctgcctcagcctcccaagtagctgcgattacaggcatgtggcaccatgcccggctaattttgtatttttagtagagacgtggtttctccatgttgatcaggctggtcttgaactcctgacctgaggtgattccccctcctcggcctcccaaagtactgggattacagacgtgagccaccacacctggacttttattttttttttattttaattttattgtattagagacagggtcttgctctgtcacctaggctggagtacagtggcgtgatcttggctcactgcaacctcaaccttctgggttcaggggatcctcccgcctcagcctcccaagtagctaggattacaggtgtgccaccacttctggctaatattgtttttgtattttttgtagagatgggccttcactacgttgcccaggctgatcttgaactcctaagattaaatgatctgccggtctcagcctcccaaactgcagggattacaggcatgagccaccttgagacttattcacagttggctgagtctaggaccctgggggacatagttgagagttgaggtcaatactcaaggttggcctgatcttgctgttgggagtcccatcaaaagtagccttaattaaaggccgaatgagacaaattgaagtgatttttttttttttttttgagatggagtctctgtggcccaggctggagtgcaatggcacaatcttggctcattgcaacctctgcctcccaggtttaagcgattcttctgcctcagcctcccaagtagctgggattacaggcacctaccacgacacctggctgtttttttgtatttttagtagagaaagagttgccccatgttggccaggctagtttcaaactcctgacctcaagtgatttcagcctcccaaagtgctgggattacaggtgtgagccaccatgcctggcctgaagtgattttattccagcctgttagttagatgaatcagagtggctgatgggtgtcagagtcatttgaaaacttgccagaagctaagatgatgcgggtctgggggtgggtattgctgtgttgggagactgtcctccacagttgtcttgtgtttcctgcatgttgtgtggggtgtgcatggctgcaaggccctggtcactgtttcttcagggttgtttacgcagctggcaaacttgagcaatgaggcaacccctcccctctcacaaagagaggcttgcttgttgattgctataaagaagagggggttccctaagctcagtgctcctctcctgtaatacaaccctctgtacgtgcaggcatccacctgggccctggcattgcccttacagagtttggagagaaaggagaaccaatgaaaacatgctgtgtttatgctgctggctgtactgggaggaatatggtcctttgtctctgacccaggagtttcatgtcttctgccaagatacattacatggacagatacattaggtagatagatacattagatatagatagatacattagatatagatagatacattagatatagatacattagatatagatggatacacagatagatacacagatagatagatagatagatagatagatagatagatagatagatagattcatttatttattgagacagagtcttgctctgtcaccgaagctggagggtagtggcttgttcttggctcactgcaacctccacctcctgggttcaggtgattctcctgcctcagcctccacagcagctgggattacatgcccacctaatttttgtatttttagtacagacagggtttcaccatattgcccaggctggtctcgaactcctgacctcaggtgatcttcccgccttggcctctcaaagtgctgggattacaggcatgcactaccgcgcccagccagatgccgccattaagtgcttttttgggaagaggttgctcacacctccatttgtacaagggatacttgcattctattagatggaagcacaatgatgttttcttgttgtataaaagtttaaataagggtagatttgtgtgaacagatactgagtagccaaaatgttggcctgtgttggacactgttgcctctcagttccatattcttctttcttctcttttctatcgatggccaggctaggaagcctacaaaacatattccccaggcccctgtggtattgtcagtgaggcatgttgctttctgctgctttaaatgctttactcacagccctaacctctttgcactcaattccagcacttatgtcatctctgcgtctactgcttgtctttttctcttggtgagttgcaattttgattctttgtatgctgagcaattttgggttgtattctggacatcttaaatattatgtgataaggtgctgggtcttgtttaaattctatgtagattgtggatacgttttgtgcgggggggttgttttgtttcgtttttgacacaaggtctccccctgtctcccaggctggagtgcagtggcgtgatcttggcccactgcaacctccgtctcccaggttcaagagattctcccacctcagcctcttgagtagctgagattacaggcatgtgccaccacagcccggctaatttttgtatttttattagagatggggtttcatcatattgctcaagctggtcttgaacttctgacctcaggtgatccacccgccttggcctcccaaagtactgggattacacgcataagccaccacgcccggcctgttttagttttgttgagacagtgtctcgctctgttgctcaggctggagtgcagtggcatgacctcggctcactgcagcctccacctcccaggctcaagcgatcctctcacctcagcctcccaagtatctgggattacaggcacgtgccaccatgcctggctaatttttgtattttttggtatagatggggtttcaccatattggccaggctggtcttgaacgcctgactgcaagtggtcctcctgcctcggcctcccaaagtgctgtgattacaggcgtgagccaccacacccggcgatacttttgttttgacaggtcactgacctagtttggttcagctcagggcttctgagcagcctgctgtgggttgtggtttcaggtgagttctgacttcaaagtcgttacaatgactttctaatctgtcttccccatggaccacccactggccagactggaacccagatggtgttgaatcccttcattgtgtcttcaacatctttggaatgttgtttaggctcagatccacatgcatcttaggggcaaacagagaaattcatgaaagcaacttcattaggtcactttcccaatctcctccctctccgcggtactttctggtttctctcccctttgttggtcctccagccagaaagctggggcctcagctaccccacttgcctcacacttcctgtgattgaacctgcatctacagcgaagtgggcaggaggatgcagggggaaagaaagcaatggggatgggtgctgtccccgggggaccacagagccttgatcagggaggagagaacagagaaagaaacagaaaaaggggaaacaggggattcccccaccctctgatcattaaaaggcattcattcattcattcattcattcattcattcgagatggagtctcactctgtcgcccaggttggagtgcagtggcgcgatctcggctcactgcaacccccgcctcctgggttcaagtgattctcccacgtcagcttcccaagtagctgggatgaaaggcatcaaccaccaggcctggctaatttttgtattttttggtagagacggggtttcaccatgttggccaggctggtcttaaactcctgacctcaagtggtccaccaaccttggcgtcccaaagtgctgggattacaggtgtgagcaacggtgcctggctggcccttattattattataaagatgataatatattcattgaacttagggccttaggacatttttttttagtcttacaatcttgctctgtcgcccaggctggagtgcagtggtgtgatcatagctcactgcagcgttgacctcccaggctcaggcgacactcccacctcagcctcccaagtagctgggaccacaggcacatgccaccacacagggctaatttttaattattttttttccagagacggaggatcttgctatgttacccaggctggtctccaattcctgggctcaagcaatcctcccaccttggcctcccaaagagctgggattacagatgtgagccacgacacctggccctgaaaattttgtttgcaatgaacaattttaagagattgggtattgttttcaaagtggaatagcagcaaatagtcctttctttgctcaagagccctatttgggtattcagaagttcttattaatgtttcccttcctcctgcttctctgcacaaccctacctcctctgcttcttctacaccaatgtacctggacttggatggcttggggtattgggctgagcccatcgctggaaggacctgaggctaggaatggtgggctgtgggcaggttaagagggaagaagaggctggaaagtttctgggccgtctgtgggagggaagactccctgggactcactcaccagggggttgctgaacgtcactgaggctgctttggtgtggcctttctgcctttgacagcaggaggaactggggtgagaacaaagctattggcaaaggagaaaggggagaggttagggatccaggaatcaggcctctgccccttctccttcagcgtctccctctttctttctttctttctttccttctttctttcttttctttctctttcttttttctctttctctttctttttctttttctttctttcctttctttctttcctttcctcctttctttccttccttccttctctctttctctctttctttctttttcttggagattccacttttgttgcccaggctgaagtgcaatggtacaatctcacctcactgcaacctccacctcatggattcaagtgattctcctgcctcagtctcctgagtagctgggattacaggcacgtgccaccatgcccggctaatttttgtatttttagtagaaaagggatttcgccatgttggccaggctggtctcaaactcctgatctcaggtgatctgcctgcctcggcctcccaaagtgctgggattacaagcgtgatccaccacgcccggcctccattgctttctgttcccagtccccgacacacacatctaaaaaggcaagttcgacgagagccaggatttttatctgtcccgtttctggttgtatccctgacacctagaacagatgagagttcttgacacagagtatgaactccataaatatttttaggccgagcatggtggttcacgcctgtagtcccagcactttgggaggccaaggagggaggattgcttgaccccaggagtttaagacctgcctgggcaacataggagatgctgactctacaaaataaaaaataacaaaatagctgtgcatggtggtgtacccctgtcatcccagctactcgggaggctgaggtgggagaatcgtttgagcccaggtgttggaggctgcagtgagacatcattgcaccactgtacttcaggctaggcaacagaattagaccctgtctctaaaagaaaaaaataaaaaatacttaaaaattagatcaatgaatgaatgaatgaaaaagtgtttgggactaggtgcagtgactcatacctgtaatcccagcactttgggaggccaagttgggtggatcacttgaggtcaggagtttgagaccagcctgcccaacatggtgaaaccctgtctctactaaaaatacaaaacttagccaggcatattggcgggcacttgtaatcccagctattcaggaggctgaggcaggagaatcgcttgaacctg[450 bp omitted]ggagtgggctggagggaacaagtgaaggctgggaggccaggagggaggctgggttgatggtctaggcaggagaggatgaggtatgaataagctggggtccgggtgtggagacgaagaaggtggaattgggcagagaaagtcagggggcagcagggatggggctgggggctgatgggctgtggggaggtgaaggggaggaaaggagagaggaaggtgcctggggtgtggcctggtgactgggtagacagtggctccactcctgagaggtacagaatctgggagaatggggtctgggaggcagatgctgagtgtgagagactgtggggagaggaggtgggccaagaagcatttcaa[135 bp omitted]acatggagaaaccccatctctactaaaaaatacaaaaatcagccaggcatggtggcaggtgcctgtaatcccagctacttgggagactgaggcaggagaattgcttgaatccgggaggcggaggttgcagtgagtcgggatctgtgtcagtgcactccagcctgggcgacagcacaagacttcgtctcaaaacaaaacaaaacaaaaaaatacccccaaacaacaacaacaaaacattttattatggaaacagttataacctacagaaaagtagagaaaatcatataacgaaaccccacgtactcatcattcagctcattccgcttcagtgtgaaacatttttgccgttcctcttttgtttacgactccatccgcacttagttatattttgctacagtgtttaatagtacatctggtgcttcttaaaaatggaaatgatttttttttggctgcagtaatggtatcatatgttctctaaagaattgatactgtgctgaaaatacaaaaaaaaaaaaaacaacataaatgggtcaggtgcagtggctcatacctgtaatctcagtactttgggaggctgaggcaggaggattgcgtgagcccaggagtttgagaccagcctgggcagcatgggaaaaatcccatctctacaaaaaataaaatacaaaaaattagccaggtatggtgatgtgtgcctgaggttccagttactggaggggctcaggcaggacgatcgcttgaaccccggagttggaggctgcagtgagctataattgtaccaccgcactccagcctgggcaacagggcaagaactccatctcaaacaacataaatgtcattcatcattgcaattctcatgcaactgatgttaaagtttggttctatatcctcctagacactttacacagatacttttgcaaaagtaggagtataccattgtaacaggaatgccacaccaaaggttgctgcctagccatgagaacacctctcctgagtggtccaagctggtggtcagagatgagcacctagaggcatctttgtcacccagcagactaggctctccactttcctgctgcttcctttaaatggaccattcagacatttgcctgtgaatttaaagtgatccacacccttctcctctgtacacctattccgctagctgtgatgcattctctctctctctctctctgactcttcttcttccctgccttgcaggacccagggatggagcagtgtcctcactcattgcactcaccctacccaggatctgtaagtaataaatcttggaccttatatatatatttattttaatttgatttccattggttattgggaaataggtggtgtttggttacatgagtaaggtctttagtggtgatttgtgagattttggtgcgattatctcctgagcagtatacactgagcccaatttgtagtcttttattcctcgctcctttcccaccctgagtcccaaaagtccatcgtgtcattcttatacctttgcatcctcatagcttagctcccacttatgagtaagaacatacaatatttggttttccattcctgagttacttcccttagaataatagtctctaatcctatctaggttgctgcaaatgccattaattcattcatttttatggctaggtagtattccatcatgtatctatatatacacatatatatgtatatatatgtgtatatatacacatatatatgtatatatatacacgtgtatatatatgtgtgtgtgtatatatatacgtgtatatatgtgtgtgtatatatatacgtgtatatatatgtgtgtatatgtgtgtgtgtgtgtgtgtgtgtgtgtgtgtgtatatatatatatatatacacaccacagtttccttatccacttgttgattgatggtgggcatttgtgttgcttccacgtttttgcaattgcaaattatgctgctataaacgtgtgtgcaagtatctttttcatacaacttctcttcttctgggtacatacccaggagtgggtgttgttttttgttttttgttttttctgtttttttttgttttttatgaagtctcgctttgtcaccaggctggagtgcagtgatgtgatctcggttcactgcaacctctgcctcccgggttcaggcaattctcctgcctc[133 bp omitted]agactcccaaagtgctgggatcacaggcgtgagccaccgcagccggcatccaggagtggttttgctggatcaaatggtagctctacttttagtcctttaaggaatctccacactgttttccatagtggctgtactagtttacattcccaccagcagtgcagaagtgtcacaccgcatccatggcaacatctattatgtcttgattttttgattatgacctttcttgcaggattaaggtggtatctcatggtggttttgatttgcatttccctgaccattagtgatgttgagcattttttcatatgtttcttggccatttccatatcttcttctgagaattgtgtattcatgtccttagcccactttttgatgggattgtttttgttcttgctaatttgagttcgttgtagtttctggatattgatattagtcctttgtcagatgtgtagattgtgaagattttctcccactctgtggttgatcggtttaccctgctgactgttccttctaccgtgcaaaagctctttagtttgattaagacccagctatttatctttgtttttattgcatttgcttttgggctcttggtcaggaaatcctcgcctaagtcaatgtctaaaagggtttccccaatgatatcttttagattttttatggtttcagggcttagatttaagtccttgatccatcttagttgatttttgtataaggtgagagaggaggatccagtttcattctacatgtggctgccaatgatcccagcaccatttgttgaatagtgtggcctttccccactttgtttttgtttgctttgctttgac[144 bp omitted]gcctccgaagtagctgggactacaggtgtccaccaccacgcccaactaatattttgtatttttagtagagacggggttccactg[139 bp omitted]gtacccatcaatctgtcatctacgttaggtatttctcctaatgctatccctccccttgcccccacccctgacaggccccagtgtgtggtgttctcctcctgtgtccatgtgttctcattgttcaactcccacttttgagtgagaacatgtggtgtttggttttccgttcctgtgttactttgctgagaatgatggtttccagcttcatccatgtccctgcaaaggacatgaactcatccttttttatggttgcatagtattccatggtatatatgtgctacattttctttatccagtctaccatcggtgggcattttgcttggttccaagtctttgctattgttaatactgctgcaagaaacacacgtgtacatgtgtctttatagcagaatgatttataaccctttgggcatatacccagcaatgaaattgctgggtcaaatggatataccataattcttaagggccctagcttttttctttttaagatggagtctcactctgttgtccaggctggagtgctgtggtgtgatcctggttcactgcaacctccgcctccggggttcaagtgattctcctgcctcagcctcccaagtagctcagattacaggtgcccaccaccaagcctggctaatttttgtatttttagtagagaacgggtttcaccatgttgaccaggctggtctcgaactcctaacctcaagtgatcagctcaccttggcctcccaaagtgctgggaatacaggtgtgtgctactgtgcccagctgccctagcatttttgaaattatagatgagtattgcctttatttatttatttatttatttatttatttatttatttgagacagagtcttgctctgtcacccaggctggggtgcagtggctcaatcttggctcactgcaacctctgcctcctgagttcaagcaatcctcttgcctcagcctcctgagtagctgggattacgggtgtgtaccactcggctaatttttgtatttttagtagacacagggtttcaccatgttggccaggctggtctcaaactcctgacctcaagtgatctgcccactttggccttccaaagtgctaggattacaggcatgagccatcgcgtccggccgagcattgcctttaacttaaagtcaccagctgcattcgcctctaacaagaaagcccacctgtcctttgaagctttgaagccagtcattgatttctctatagctatgaaagtcctacatggcatcttcttccagtagaaggccttttgtctccattgaaaatctgttgtttagtgcaaccaccttcatcaatgatcttagctagatctcctggataacttgctgcagcttctccatcaggacttggtgcttcaccttgcaccttttttttttttgagatggagtctcacttttgttgcccaggttggagtgcaatggtgcgatcttggctcactgaaacctctgcctcccgggttcaagtgattctcctgcctcagcctcctgagtagctgggattacaggttcccgccaccacccatgcctaattttttttctttttgtaattttaatagagacagggttttgcaacgttggccagtctggcctcgaactcctgatctcaggtgatcctctcgcctcagcctcccaaagggctgggattacaggcatgagccaccgtgcccagccaccttgcacttttctttacggagatggctactttccttaaacctcatgaaccaacctctcctggcttcaggcttttcttctgcagcttcctcctctcagccctcatagaactgaaaagtgttaaggctttgctctggattaggctttggcttaagggttttaccttctgtccagacaacactttctccatatcggtaataaggctgtttgacttcttattttttattgattgattgagacagagtctcgctctgttgcccaggctggagtgcagtagcacacaatctcagctcgctgcaacctccacctcccaggttcaagcaattctccttcctcagcctcctgagtagctgggactacaagtgtgcgctaccacaccagctaatttttgtatttttcgtagagatggggtttcaccatgttggtcaggctggtcttgaactcttgtcctcaagtgatccacccgtctcagcctcccaaagcactgagattacaggtgtgagccactgcatgcggccactccttagttttgtgttcactggagtagtacttttgatatctttcaacttttcctttgcattcacaacttagctaactggtgcaagaagcctagcttttggcctgtcttatcttttgatgagccttcctcataatcatttctagcttttgatttaaagtgagagatgtgtgactcttcctttcacttgaacactgcgaggccattgtagggttattaactgacctaatgtcaatattgtgtgtctcagggaataggtaggcccaaggagagaaagagatgggggaatggccggtgggtggagaagtcagaacacacgcaacatttattaagtttgccattttatatgggcatagtttgtggtggccccagtgacaatagaaacatcaaaggccactgatcacagatcaccatcacagatggaagaataataatgaggccggtgcggtggttcacgcctgtaatctcagcactttgggaggccaaggcaggtggatcacaatgtcaggagttcgagaccagcctggccaacatggtgaaaccccgtctgtactaaaaatacaaaaattagcagagcatggtggtgggcacctgaaatcccagctactcgggaggctgagacaggagaatcgtttgaacccagaggcggaggttgcagtgagccaagatcacaaaattgccctgcagccagggcacagggtgagactctgtctcaaaaaaaataataataatgaaaagatttaaaattttattgtgagaattaccaaaatgcagcccagagacacacagtgagcgcatgccgttagaaaaaaatggtgctgatagacttgctcaatgcagggttgccacaaacctttgatttgttaaaaaaaaaaaaatgcagtatctgtgaagcacaataaagctaagtgcaataaaatgaagagtgccctataagagcttagtcacccttcacctcgagtccttgattgtgatatcttaccgtgtttcctttatcatcaccgcctttcacatttattataacaatacctattatgtagcagacccatttgagagtaagctgtagacatgatgcccctttactcctaaatactgcagtgcgtatttccagaacggggacattcacctgtgtaaccacagtgccattgaaatcatgaaagtaacatcgatctacttctattatctacagaccttattcgtttttcccaattattccaatatgcttttttttttttttttgagttggagtcttgctctgtcacccaggctggagtgcagtggcgtgatctcagctcaccagaacatctgcctcctgggttcaagtgaccctcgtgcctcagcctcctgagtagctgggatgacaggcatgcgccaccaggcccgtctaattattgtattttctgtagagatgagattttgccatgttggccaggctggtctcgaactcctgacctcaagtaatccgcctgcctctgcctcccaaagtgctgggattacagatgtgaggcactgcgcctggcctagtctgtttttcttttttctttttcttttttttgagacagtctcttgctcttgtcacccaggctggagtgcaatggtgtgatctcagctcactgcaacctctgcctcctgagttcaagcaattctcctgcctcagcctcctgagtagctgggattactggcacccacgaccacacccggctaatttgtgtatttttagcagagatgcggtttcaccacattggccaggctagtctcaaagtcctgacctcgggtgatccccccacctcggcctcccaaagtgctgggattacgggcgtgagccaccgtgcccagccccctgtgaagtattaagaagggcactggggcttcctgtagcacttggaacagtgttctcagtgcccatacgtgtcaccaccctaatctcacacaaaaaagacctcaggtgatccgcctgcctctgcctcccaaagtgctgggattacagatgtgaggcactgcgcctggcctagtctgtttttcttttttgttttcttttttttttttccactggagccggagctcaagtgacttaggaagcatctcccacgttggattttaccttccttccaccacagcccaggtgatttgcagttcctggtggctggtggtctgtcctggctctgagaggagacaaaaggggtgggggtgagggtggggagggggtcccagcctcttctctccctgctagagtttagccccacccctattccacacagccgttccccaggctgggacatcccagacccaaagtccctggagagcgagggaggaggaggaaggggcccagggggtggtgggcctttgcctctgagctctcagggctctctaaattgggctgtagaattggttacgttggggatgcaggaagaaaaattgacgacttctgcttctattttttaaacaaaaataagcaaaataagcttcactgataccgtgtgtagaatgacagtagatcacaacgtaaattttcgatgtttgtttgcgatgttttttcagaaagttgttatctaataggggagtgtgacaaacgtttagagacttctaaggtaaataaaaaggtgtgaggggcaggtggagatttgggaattggtcgggaaccaggaagctggcattgattttttttttttttccaaggccatgaactttgtggggatgaaggggtctttgcccaggaagtcactgagcagtatggcttctagaagatgcctcccctgccccgagctgccttaaccccgtttgacgttcaaagacgcaggtgatgtcaccccctcccactgacaacacagtaaggtccaagttctctgaggcttcttgggccgtggcccagggaaagcaggtgacccacctcccagtgccgagtgggcaaggaactcgaccccgagtaaggaccaagcatgacggtgagctagagaggacctacatgccaggttcggttctgggcacgttaccctctattttcttatttttatttatttagagtctcactctgttgcccaggctggagtgtagtggggtgatcttggttcaccacaacctccacctcccaggttcaagcaattctcctgcctcagcctcccaagtagctgggactacaggcatgcaccaccacatctggcaaatttttaaattttttttagtagagatggggtttcaccctgttggccagactggtcttgaactcctgacctcaggtgatccgcctggctcggtctcccaaagtgctgggatgatactgtgcctggccttgttttatttgtagagagatgaggtctcactctgttgcccaggctggagtgcagtggcgattcataggcatggtcctcatgggctacagcctcagactcaaacctcagcctgagtagctaggactccatgggtgcactgcgccgggctcagcaccccacagtggtgagagttgttacggtgatttagtgtggccgtcggttactcaggtagacttggtttgttgtccttgactgctgcaccgtcctccatagcatgcatttaagatccacattttatatttgattccctaaataatgagacagcttcttgtaatcacaaacgtgatccaaacatgatcacgatgaaccatccgtttctagggtttgtgtgagaactttcctatgcttgggaatggagtcactggcccgtaaatctgtgcttaatttttttttttttttttttgagtccaagtctcgctctcagtctcgctttgcccaggctgcagtgcaatggcacggtctcagctcactgcaacctccgtctcctgggttcaagcaattctcctgccccagtctcctgagtagctgggatgacaggtgtctgccaccacgcccggctaattttttgtatttttagtagagacagggtttcaccatgtgggccagactggtcatgaactcctgacctcatgatgctcctgcctcagcctcccaaagtgctgggattgcaggtgtgagccaccgcgcccggcctacttcgcttaattaaatgctgcagactttcagctgtcttctgttctggttggaagccatctcagtcaaaacatggcaaaaccccatctctactaaaaatttaaaaataccctggctcattttgcatttttagtagagacgaggtttcaccatgtaggtcaggctggccttaaactcctgacctcaggtgatccgcctgcctcggccctcccaaagtgctgggattacaggtgtgagccaccgcacctggcccccattgcagtttgagaggctttatataataaagggcagagcactcaggaggctgctcctctagggctgcaatggtccagcatgatagctattaggcacacgtggctatttttcctttttttttttttttttggagacagagtcttgctctgtcacccagcctggagtgcggtggcacgatctcggctcactgcaaggtcccgggttcacgccattctcctgcctc[211 bp omitted]gtcttgctctgtcacccaggctggagtgcaggggcgtgatgacagctcactgcagccttggcctcccgggcccaagcgatcctcacgcccagcatcttgagtagctgggaccacaggcatgtgccaccatgaccagctaattttttttttttttttgtagagacacggtctccttatgttgcccagactagtctcaaacccctgagctcaagcgatcttcctgtcttggcctcccaacgtgttgggattacaggcgtgagccaccacacctggccaaaactcagtttttattgagctataatttacagacaacaagcacagatactaaatgtatactttaatgagttttgacaaatgacccctgtcaccaatgccccaatttccgtcactccagagagttactttgggttcctttctcttcaccccagaagcaatgactgatttccatcactacatataagtctgacctgttcttgggtttcatagataatagattcacacaatacatagacatttgtgtctggcctgttacatttaatatagaacatctttgctaagcccgaggtcataaagatattctatgttttcttccggaagtttctagttttggcttttgaatttaggtctttggttcctgttaatttggggtgggggtatggtatgtggcaggaatatgtttatatttttctatatggctatacagtagttctagccctgtttgttaaaaagactttcccttacccattgaattgctgtgatatctttactgaacatcaattggtcatatgtgtataggtggatttctgttctgttctattgatcttttggtttatctttaggctaatataacactgccctgactactgtagctttatagtaaatcttgaaattcgatagtatgagtctccaacgtgttctttctcaagattgtttggactactttaggtcttttgcattttttttttttttttttttttgagatggagtcttgctccattgcccaggctggagtgcagtggtgtgatctcaggtcattgcaacctccctgcctactgagttcaagcaattctcctgcctcagcctcctaagtgaaattacaggcacccgataccacgcctggctaattattttttagtagagatggggtttcctcatgttggccaggctggtctcaaactcctgacctcaggtgatcctcctgccttggcctcccaaagtgctgggatgaccggcataagccactacacccggccggtcctttgcattttcatgtacattttagaatcagcttgtcaattcctcaacaaacctggctgagatctgaattgccattgtgttgaatctgtagatcaatttggggagaactgatatcttgttttttgagacagagtcttactctgttacccatgcaggagtgcagtggtgcgatctcggctcactgcagcctctgcctcgcaggctcaagcgattctcctacctcagcctcctgagtagctgggattacaggtgtgtaccaccatgcccagctaatttttttgtatttttagtagagacagggtttcaccatgttggccaggctggtctcaaactgctgagctcaagtaatccacccacctcggcctcccgaagtgctgggattacaggcgtgagccaccacgcccggcctacaccaattctttgaattcataaacaaatatttccatttatttaggtttttctctcaaaaataccttgtagttttcagtatagagatttttgaatatcttttgttaaatatagtcttagcatttgatttttgaggctattgtaaatggttttgtttttaaaatttcacttaactatggtttgttgctagtatgcagaaatgtgattatttttgtatattggcttttatttttgtgactttcctaagtgcacttattctagtagctttttatttttgtagattccctaggatttcctaattacatgcttatgacatctgtgaataaagacagttttacttcttcctagccagtttctatgctttttatatctttttcttgccttctttcactggctaggaacttcactatagtgttgaacagaagtggtgtaaagggatttcccttccctgttttcagtattggggaaagtattcagtatttcatcatttagtatgatgttagctgtagcttttgtcattgttgttaatatccttaacacaatgaatgattctcaaccgagggtgatttcccacctcttccagggacatttggtaatgtcatatgacttttttttttttttttttttttttttttttgagactgagtctcgctctatcactcaggctggagtgcagtggcgtgatctcggctcactgcaaactccgcctcccgggttcacgccattctcctgcctcagcctcctgagtagctgggactacaggcgcccgccac[131 bp omitted]cactgcacttggcctgtcatgtgacatttttcattgtcacaaacagctgagtggggagcgttgatgctggcatcttgagggtgaaggctaggaacactgccaagcattctaggatgcacagcacagcctctccccaccccagcaaagaattttctgggcaaaatccccatcatgttcaggtagagaatctctgcccagcacatggaggaagttctgttgtatttctagtttgttgcaggttttttttcctccaataataggtgttgaattttgtcaaatggttcttccctttaatctattaatgtaataagttacattaatttctgggataaaaccacttgcttatactgtatccactttgtttgtggattaaatttgctaatatactttgagacagtctctcgttctgtcgcccaggctggagggcgtgatcttagctcactgcaacctccgcctcctgggttcaagctattctcctgcctcagcctcccgagtagctgggattataggcgcctgccaccacgcccggctaatttttatatttttagtagagatggggtttcatcatgttagccaggctggtctcaaactcctgacctgaagtgatccacccacctcccaaagtgctgtgattacaggcacaagccactgcgcctggccaaatttaacttttaaactcagaaatggggctatttagattttctacttgcatcagtctttgtaatttgtaccttgcaaggtgtttaagttgaacttataggtataattttgatcataatattccattattattttgatgtcatcaagatctatgatggtgctccttttgttttagagtctctgttgtgcaggctgggtcaccgcagcctccacctcctggcttcaagcgattctcttgcctcagcctcctgagtagctgggattacaggcacatgccaccacacctagctaatttttatatttttagtagagatgagattttgccatgttggccaggtgggtctcaaactcctgacctcaagtgatccgcctgcctcattctcccaaagtgctgggattacaggtgtgcgccactgtgcctggccaattccctgtattttaaatgttttttttttttctatcttttccaccagctactgaaaagaaagtgttatccaactatgattatgaatttatgtgtttcttgctggagttctgaaaatttttatctattttgaaactgttatgagctgcataaacatttatataattctggcttcctgctgaattggctcatttatcattatgaaatcctcttcctaatctgtagtgttacttgcttgacttcgatgttaatgttaccacactagctttctcattggtttgcatggtatgtttttccattcctttttttttttttttttgagacggagtttcgctcttgttgcccaggctggagtgcagtggcacgatcttggctgactacaacctctgcctcccgggttcaagcaattctcctgcctcagcctcccaagtggctgggattacaggcatgtgccaccacacctggctaattttttgtatttttagtagagacagggtttcaccatgttagccaggctggtctcgaactcctgacctcaggtgatccatctgccttggcctcctaaagtgctgggattacaggcatgagccaccgtgcctggccccattcttactttaacctgtgtctttatgaagggcatctcttgaaaacagcctgtggttgagtcctacattatttaggttgataattgctgccctgcttctctcccctctccctctgaaactccaattatacatatattagtctcacaggtcgctgatactatgtttagcttttcttaattctttttctctttctgcttcactttaatttctatgtagctatcttcaagctgatcctctcttccactggttccagtccatattaaacccatccagtgaaactttcatctttttgttttagaattcccatgaggttctttagagtttcaatatctttctgaatattgaaaaccatcgctttctattaaattccttaacatatttgtaagttgttttaaagctcttgtctgctaattctaatgtctggatgatctgtgagtcatttttctcttggtcatgggttacattttcttggttttattattttaaattttatgctggatattgtatgtagaagaaaaaacgcatgttatttgtttactttgtttagtttcaatgagttcatgccttttatcccaaaagtcggctaggatgagggctatttagatttttctaagagttgagttgagctggggctgggaacagtcttaattaaatttttctccaccttcacatggaattaagagagctcacttcgcccttgatgccccaaccttctgcacctgccatcagactagttcctttgatgttgtcattgagtttgagtgagttgggttgtggctttagatgtttatggtctttctttgtattcaactccagtggggcccaggactctgagcatcataagacttatacacacttcctcagcagaattcctgggactactgtgaggataactgttggatcaagcagttgacttatgtgttggggattcttcaagactacactacctattggcagcccatgctgttattaaatgcctggatggtttcttcttagctgtgcaaaaagtctgtccacctatgaaaactcttccactcaccttacccagattaagcacttacccacagatataaaaacattcatggccgggtgcagtg[131 bp omitted]cacacacacacacacacacacgaaaaaaattagctgggcgtggta[180 bp omitted]gcccactggtcttcagtaactttataagaaagtgtggtttttattttattcatttcaaaagctcccgctaccatcaaagctgggaggtttgtatccttcaacattctgactagaagaaaaattctgctgtgaagcatttgtgaatcccaatgcctggatgcacccaagaccaagtaagtcagaatctctggaggaggaactcaggagcgttttctcatgttccccaaatgattcaaatatacagcctgggtgtataaccactgattgtggccccatgagctgtaacagccttcttttgtgagttatagaattgattttggaatcttcctccctctatttgcgatttatggaaagcttagaacagtcgcatctctgagactattttcttacctataaagtggtggatattatattagagcattccttttttgtttgagtccgagtctcgctctgtcacatgggctggagcgcagtggcgtgatctcgactctctgcagcctccacctctgcctcctgggttcaagcgattctgctgcctcagcctctagagtagctgggaccacaggggcgtgccaccatgtctggctaatttttgtattttttaatggggatggggtttcaccatgttgcccaagctgggctcaaactcctgacctcaggtgattcatctgccttggtctcccaaagtgctgggttacaggcgtgagccactgtgtctggccgcgttcctttttttaatggctgcgagaagaaaggatgttattatgaatggaaaggtctgaagtctgaagggccatgaagctgatggattgctaaggtaaagggaggggcctttccttgtacctgtgaggctctgattacttacttctcaacacaggcgtggccattggtggtggcccagaatccctgcactagaaagacgagggatgttgtccgcgttgaggttatcaggttgaccagggctgcaatggcagccaccttgacataatcgtcacctccggccttgtaggaggtgaaggtgatgatggtccccatgcccaggctcagggaagagggtacacggcccctgcttgatgccacaggtccagggaggataaggcagagagctgtgggtgactgagaagtttttaggagtgggcttggaagggtaggactaccagtaaataagcaggctaaggggtcggctaaggtagagagcaaaaggataaaagggaggctgggggcagaaagaaaggagatgtgggggaaggagactctgaggtcttgagagtcgagagagggagaaggtttggagtcccgggcctcacctctgtggtgatcatacgtctgaggctcgtgaccacaccttccaggaagaggcagaggaggatgacggaggggaggagaggaagacagaggtgagcatcagcaggggcctcccagtcaggagtagaaatatgaacggtgtcaaggtggcccagaagtaacacgatggaattatgggaggacgattctaaggagacaatatttgtggtttggagcaaacaataagctgcccaggagtcaggggcgagactccaagtaaagatggctttgaaagggtgggtagttggacacttaattccccggccttggatttacggcttatgtgtgagtttaaggagaggaaaagaaactgagaagagactttgagagagaataacataactaagaggaattttagtgatttgccccggaggtagttgagctatggcccctctctctgcatatccctatcaaacctttagtaaagtctacttttgtaggagtggtttatttttggaggctgtgaagagatggcgagctgagtctccaggggtggagatggatgacgtgaaaggtgaccacctgcatgaatgcagggaccaggaggtacaggtagagtttaccaaaataatctgataaaca[137 bp omitted]gcctctcgagtagctgggactacaggcatgcaccaccacacatggctaatttttgtatttttagtagagatggggtttcaccatattggccaggctggtcttgaactcctgggctcaatcaatcctcccacctcggtctcccagtgtactgggattacaggtgtgagccactgcacccggcctgaaatacattttctatgtaaagggagcatgatccagatgccaaggagatggattgaaagaaaatactcccaggctgggtgtggtggttcacacctataatccaggcactttgggaggtgggtagatcacttgaggtcaggagttcaagaccagcctggccgacatggtgaaaccccatccctactaaaaaatataaaagttagctgggtgtggtcatgggcacctatagtcgcagctactcaggaggctgaggcaggagaattgcttgaacctgggaggcagaggttgcagtgagccgagatcatgccattgcactccagcctgggtaacagagcaagacaccat[136 bp omitted]gtctctactaaaattagttgggcatggtggcatgtgcctgtagtcccagctactcaggaggctgaggtaggggaatcgcttgaatccgggaggcggaggctgcagtgagccgagagcacactgttgcactccagcctggcaacacagtgagactccgtctcaaaaaaataaagaaatacaaaaaattacctggcatggtggtgggtgcctgtaatcccagctactcaggaggctgaggcaggagaatcacttgagcctgggaggcagaggttgcagtgagttgagatagcgccattgcactccagcttaggcaacaagagcaaaactcagtctcaaaaaaaaaaaaaaaaagctccaaatgggtacctggaatggaattggtgccactcagctcctttaggggttaacatgttgtcaaaatgcagggaggtggaggttgcaggactcagctggggagactgtggtctgatctgaaaggttgcccacaggtgtctgcctgcagcgatgtggggatctggttgatagtgaggcatttcttcacgctgtcaatgggacagcagttctctgtagagagacctggccgacttagcttgtctgaggagagtacagaatcttcctcggacccctggagggagacgccgggtggccacatctgagtctagctccatcatgcaggctagagtgcagtggcgcgatctcagctcactgcaacctccacctcccaggttcaagcgattctcctgcctcagcctgaggtcaagagttcaagactagcctggccaacatggcaaaactactaaaaatacaaaaattagccgggtgtggtggcaggtgcctgtaatcccagccatttgggaggctgaggcatatctgagcttgtcctcagggcaggtggaagggtcacagggattgcagaagagcagtcaacagggaagagttgggctgtgttggggtggagagtgtggaagtcttcggatttgcaaaggtgacagggtagcggggctggccgtcaggggagcttaccggcgttgaaatccaaatccctgtgatcacgaccgagaagacaacccaggctgcggttcgggacgagggcttcagccgcttcttcactgtggtccgaggcatggagggtagtgtggtacaagaagtactggtgggcccagtctgaaggcaagagacgtctcggggaggggactcaggtaccaccttgctcggtgcctacttctgttcacttcctccccttggtgtccctgcctcccttggccctgctggcccctctcctcaccagtgacactgatgttcttcaccagtgggcagtggtcccagggcagggggtgagcaaaggagtagaagaaattccaggagatgatggtgctgttgtacaagctcaccgaggcgcacacctgggggtggacacggtgggcagagacctggagaccacagagggagatcggggatggcctggggctgggtccctcatttaccagactgtgagcatagctcatgctgcacagccaggggacaagctgcttccagacccggatgttgtccacatgcagccactgccccatgatcacctccatgtataagagcgggatcccgaataagagaagcatgaagaagtacatcaggatgaagctgcctgggaagggagccaggggctgtgctcaggcagccaggagtcctggccctgtccccattttcccctaggagcccacgtgcccaaccccagctttctcctccttcagggcccaggactccaagctcccagccttgaaacgccttccttaagctcaggacccaggcccctggccttacctcctccgttccggtgacacaggtaaggagaacgccacacgctgcccagcccgacagagaaggcaatctggatcaagatgctctcagtgtttttaggttgaacgaagtagttttgggtcttggtggcctggatctccttggtcttgagcctccaggacagggagttgggggtctggaatttcttagaagactctttctctgtcagataattcctcaagggactccgtggctcttctttcaggcccggtaaatcctgagaaaatcttgggtcaccaagagcagcagaatttaaaggacacgtctcaggtgccaggctgtgaaatttcataaccagggctttggagaaatgagggccagagtttaaatcttggcccttctccttatgagttactaacttatgggcaatatacatatatattttttgagatggggtcttactctgccacccaggctggagtgagtggcatgatctcagctcactgcaacctccgcctcccaggttcaagggattctcctgcctcacgagtagctgggattacaggtgtgtcctactatatcagataatttttgtatttctagtagagacagggttttgccatgttgtccaggctggtctcagaactcctgacctcaagtgatctgcctgtctcggcctcccaaagtgctgggattacaggtgtgagccgccacacccagttctgtttttctcatcttaaaagcagcggtgaatttcaaaatatttaataaaagctatggtgtgagcactcaccaatcagaatgaatgccagccataaacactggagtatcagctgaacaccagtcctgtctgaaatgattaaaataacacaatggaatattgagtgccaagagcacagtaaacaatggatacactcaggtttctttcccgttgacttctggtgtacttggaaacttttaggcccaactaatgcacatagacttctaggccaggttttacaaacacagctgtttatcacagtcactgggggagctctaaaatgatacagattcctgccttccattctgctagcctcactcctctagattaagtctaaggtggggatagagatgggtagaattttttttcttttgagacacagtctcactctgtcgcccaggctggagtgcagtggcgtgatcttggctcactgcaccctctgccacccaggttctagcgattcttctgcctcagcctcccgagtagctgggattacaggcatgcaccaccatacccggctaatttttatatttgtagtacagacagggtttcaccatgttggccaggctggtcttgatctcctgacctcatgatccacccaccttggcctcccaaagtactgggattacaggtatgagccactgcggccagccacgatgggtagactttaaaagcttcgttgggattccacctttggaaaggcagcatgaggagctctatggacccactccctagtaaaacaagtcaacttgtgagaaatataaagaaaaacatttacggtctctagaaattgtcctaagggcatatagcaagtgacaaaatatttattcaagaaaatatactaaaattctgggcaggcacagtggctcacacctgtaatcccagcactttggaaggccaaggcaggcaggtcacttgaggtcaggagtttgagatcagcctggccaacacggcaaaaccctatctctactaaaaatacaaaaattagccaggcacgtgcttgtaatcctagctactcgggaggatgaggcaggagaattgcttgaacccgggaggtggaggttgcagtgagccaagatcacgccactgcactccagcctgggtgacagcaaggctccgtattaaaaaaaaaatttatatatatatatacacacacacacacacacacacacacacacacacacacacacacacggctctttctctgccttgcttccagttgaaggctatagtatcttcccaggagggacaggccaccagcatttctcattcctctccagctacctgttgcaagtgtggtaaaaaggtcaggagctcccttcttctatccagtactgctcctcccctcttttagggcagaggctccaccccagccatttgagaatgctggagccctgatctcccctggccctagctcatgtgtaaggctaaggttacattccaggagaggcaagttgataagaaagtttaatgccccatccagcaacctgctgctaaggcagctgtgtcgctcagagagaaataggccactgtccctacccatctctggagattttactcagggagaaagccaagccttcagaacaaagagctctgaaagtctctccccaaagaactgacttgacttgaaacagcgtgggagagctcaagcctaagggcatgctcgaaaatggtggaggaggttctgttggtaagtaattaagaggaagctggtagcttcatgagacacaagctaaaccacaggccaactagtataccagagagaatcagggaaacagctaagaaggtcactcctgggttcagaacaactctcaaacaccaacctctaaaactactcctttaagggagcctaaatttaagtggaccagatgcagaacaatttatgcctcagagcattgtcaaaaacaataatcaggtggcaattagtggagcctaaaagctgagtgtggtgagggaaagagacaggagagcccacctaaaaccactgtcatcctagggtgacaatgcatgtctaaagctgtgccctttgaggaatatacattatgaccagcaggatttattccaggaatgcaaggttggtttaatatctgaaaatcaatgttatatcaatagaataaagaacaaaacccaataaagaacaaaacccatatgatcatcacagtagatatataaagagcacttgacaaaatccaacacctttcatgataaacactcaacaaacctagaaatagaaggaaatcttgacttgataaagggaatctacaaaaaaaaatctatggttaacatcatacttaatggtgaaaactgaatcctttccaagatcaggaataagacatgagtgtttttctcaccacttctgttcaatattgtactggagattctagccagagaaattaggcaagacaataaaataaaagacatcaagaatgaaaaagaaataaactgtctctcttcccatataacatgatcttgtataaagaaaatcctaaggaatccactaaactattagaactccaataggttcagtaaggttgcagaatacaagatcaatatacaaaaattgtatttctatatacttgcaaaaaatccaaaatttaagaaaactgttccatatatgatagtatgtgatacagtttggatgtttgtcccctccaaatctcatgttgaaatgtaatccctactgttggaggtggggcctggtgagaggtgtttgggtcatggggccagatctctgatgaatggcttgttgctgacctcttgatagtgaatggcttcttgtgagatctggttaagagtgtgtggctcttcctcctctctctcttgcttctgctcgtgtgtagtagaagtgacatgctggctctttatgaccttccaccaagattttaagtgtcctgaggccttcagcagaagcagatgctagcactatgcttcctgtatatcctgcagaaccgtgtgccaaaataaaacctcttttctttataaattaaagcagcatgggactggtataaggatgcacaatagaccaataggaataccagtcaggtattcctttatagcaatgcaaaagtggcctaatgcagtgtcaaaaaaaaaaataaaatacttagtaatacatttaacaaaaggacaaattttatactctgaaaattacaaaacatgttgaaagaagatttaatgaaaagaaatcccatgtttatgaaccagaaaactaagtattaagatggcaatatttcccaagttgatctatagaattaatgcagtccatctcaaaatccctagctggcttctttgcagaaaatgaccagctgatgatataattcatctggaaattaaaggcggcccagaagagccaaaacaaacttgacaaagaacaatgtcggaggactcatgcttcctgatttcaaaacttattatactgctacagtaattaaagctgcatgggactggtacaagaatgcatataaaccaacaggataccataggatagaatagcccagaaataaacctttatgtatgtagtcaattttcaacaagagtgccaagagtactcaatgagaaaaagacagtttctccaacagatattgggaaaattggatatacacatgcaaaaaaaataaccttggatccttacactctacacaataattaacaaaatggataaaagacctacatgtaagagcaaaaactataaaccttttagaagaaaatgttggggagcaaatctctatgaccttggtttggcaatggtttcttaaatatgacaccaaaatttgtccttttgtgcatcaaaagacattatcagagagtgaaaagataacccatcgaatgggagaaaacatttgcaaatcaagtatttggtaagattcgagtatccagaatataaaaataactcctacaactgaaaaaaaactaaactcagttaaaaaaaatgggcaaagtatgttaattagccctattgcgccatttcactacatatacatgttccaaaacatcacgttgtacatgataaatatatataatttgcatctgttactttaaaaatcaattttttaaaaagggcaaaggacatcaatagacatttcttccaagaagataaacagatggccaaaaagcagatgaaaagatgctcaacattgctaatcactagaggcaggcaaatcaagaccagagttaccatttcacactgatgaagatggctacaagaaaaaaaaaaatcagtgggaaataacaactgctggggaggatgtggtgaaattagaatcattatgcattgaggataagaatgtccactggagcagccatggtaaaaaccagtttggcagttcctcaaaaagtaaaacaattaccattggatccaacaattccacttccgggtaca[135 bp omitted]cctgtctctactaaaaatacaaaaaattagccgggcatggtg[167 bp omitted]agaataaactctggtataccctacaatggaatattattcatccataaaaaatgaaattcagatacatgctataacatggatgagccttgaaaacatgttaaatgaaataagccagatacaaaaagacaaatattatgattctatttatatgaaatatctagaataggcaaattcatagagacagcatattagaggttactaggggggtgctgggcagagggagaggaattactgcttcccaggtgcagagtttctatttggggtgttgacatgttttggaactagatagagatagtggttgcacaacattgtgaaagtactaaatgccactgaagtgtttctttaaaatggctaattttatgttatgtggatttcacctcaataaaaataataaaagatgatgaaataatgctaccagacagacaaaagttgggagaatttgtcattagcacatcagcactgcaaaaaatattaaaaatctttgggctgaaggaatattattggagctggaaagagatgtaagagtaaaataagagacgcagaaacacatactgcgtgatttcactcatacgtggaatctgaaaaagttgatctagaagtagagactaaaatggtggttaccagagtggggatgatgggggagtggggtgctggggagttgttggtcaaataatacaaaatttcagttagatgaaaagaataggtttaagataactatcattcaacatggtgactaaagttaataactacactgtaatcttgaaaaatgctgattttaaatattctcaccacaaaaatattagatatgtaaattagctacatttagcattccacaatgtatatatatttcaaaacatcatgttgaacacaaatacatacaatttcatctgtcagttaaaaaataataacataaaatttagaaaggaataaagaaaacctgaaagggtgtcccagctactacctaggtcaaagtagtcctagctactcaggaggctgaggagagaggatcacttgagccccagaagttttgaggctgcagtgagctgatcatgccattgcactccagtttgggcaacagagcaagaccgtgtaggcaaatttgagactaatgagtgcttaaagtaacaatagcagcaatgtattgtggggttcataatatgtagaagaaaaatattggagaacaattgaaaaaaaaaatggtgggaaaactagaaatagaaggcaacttccttaatctacagcttccttaagcctataactaacatcacactgaacaatgaaatatgaatgcttttctcttgagtttggggacaaggtaaggatgttcattccacattgtattaaaggtcctagcctgtgcaataaggcaagaaaaaaaagtataaagatcaaagtaaataaaactttccttatttaaaggtgatgtaagtatactgtcaagagatcatgtatgtagctgggcacagtggctcatgcttataatcctagtactgtgaggcaggaggatcagttgaggccaggagctcaagaccagcctgggcaacatagcaaaactccatttctacaaaaattgaaataaaaaattggccagatgtggtggtacacgcctgtagtcctagctacacaggaggctgaggagagaggatctcttcagcccaggagtttgaggctgcagtgagctgatatgccactgcattccagcttggacaaaagagtaagaccctgtctcaggaaaaaaaaaacccagatattgtatatgtaaaaagaatctacaaatggatgaaattaagtttgtaatcgaatttagcaaagttcctatatataaggcgattgtacaaaaaattatatttttgtatagtagcaacaaataattggaaaatactattttaaaacatcaaagaaatttaatacttagtaatcaatgtagttaaaatgtgtaagacctcgctgaaaactacaaaacaatgcaaaacacttagagaattttaccatgttcatgagttggcaagttgaacatttttacaatgtcaattatccccaaattgatctacagattcagggcaatcttaaacacaaaatcccatattgttggttttttggaaacagacaagctcgttctaaaattatatggaaagccaaagaccttagaatggctaaggctatcttgaagaagaccaaagttggaagacttaacttaccgtggacttatcttattatcttaagatttactctaaggctacataattaaaacaggaggggaggggcgggggagatgggggaggggctggagagaggggtgggagtgtggtgttggcaaaggataataaatagatcaatggaaaagagagtccataaatatactccagcctatgtggtcacttaatttataatagaattgccactgtgattgggtggcgatggatggtcttttcaataagtagtgccagaataatgatatctatgtagaaaataagcttgagcccacctcacatgacacacgaacattaattcaagatgaatcatagatataaatgtggagggtaaaacaaaagagattccaaaaaaatatgaaaatatcactttgactttgggtagcacattttcttaaatatacacaaagaaagcactaagaaaattagaactcaacctcattaaaattaagacgtttttaaaaattcaatgacatctttaagaaagtaaataggtaagccacagacggaacacatttgtaatgcacacatgtgacaaatgacttgtattcagaatataaataatgcctacaaaacaataaaaaaaaaaagcctaagaaaaggtgaaagacttgaacagggacttcacaaaagcagctattcagatgaccaatagccatataaaagtgctagatatcattactcatgatgaaaatgcaaattaaagccacaatcaggtactaccgcacagctaccagcacgaccaaaactgaaaacactgagctcatcagatactgtccagaatgtgcagtgaccgcagcgcccttccatcgctggcgggagcggaaagtgatttcaccattttggacgggtgtttggcagactccctaaagacaaaaacacctgttctatgacccataaagtcacgtctatgtgcataaaaatatgtacgagaatatttgttgccactttattcacaatagcctccaaatagtggcatattcatacaatgtaatacacaataaaaaagatccagttactgatgcccccaaaacacgaagctcaaaagcttttcagatttaattaataattttaatggttaataaagtatattctttttaaatttaaaaatatttaattgacaaaaactgtatatattcaaggcataatatgatttatgtatacactgtataatgattaccacaatcaaattaacacatccataaccaccataattatcgtgtgtgtgcgcg[142 bp omitted]caaaactactaaaaatacaaaaattagccaggtgtggtggtgggtgcctgtaatcccagctactcgggaggctgaggcaggagaatcacttgaacccaggaggcagaggttgtagtgagctgagattgcaccagtgtaccctagcctgcacgatggagcgagactgtctcaaataaaaaaaaaaaaatctgttctcttatcaaattcaggtaaataatacagtattattaactgtagccaccatgtatatattagatccccagaacttaataatcttataactcaaagtttgtaccctttaaccaacatctccccattccccataagccc[224 bp omitted]gaagcaggaggatggcatgaacccgggaggcggagcttgcagtgagcggagattgcgccactgcactccagcctgggtgacagagtgagactccatttcaaaaaaaaaaaaaaaaaaaaaaaaggcaatctatggaatcagaaaatatttgcaatgtacatccgaaatatgaatggaactcatacaacttaatagcaaacaaaccaaacgacctaattaaaaagtggacaaaggacctgagtagatatttctccaaagaagacatacaaatggccaacaagtatataaataaatgctcaacatcagccgggttcagtggctcagcactttgggaggctgaggcaggtggatcacctgaggtcaggagttggagaccagcctggccaatatggtgaaaccccatctccactaaaaatacaaaaaattagctgggcatgatggcatacgcctttagtcccagctactcaggagctgaggcaggagaatcacttgaaccccggaggcggaggttgcagtgagctgaaatcatgccactgcactccagcctcctgggcaacagagtgagactccatctcaaaaaaaaaaaaaatgctctggctattcagggtcttttgttattccatactctgggcggcaagccacctaggagccaaggcaagagaccgagggcatgagctgttccactatagtaaaatatgtaaaaacaacaagagttatactagatctagatcatagacatgattacatatgaatatcattaatcattagtttgtagcaattactctttatcccaatattataataatcctcgctctacaatcataacctaggaaaaaccaggccatacagagacaggaggtgagcggacatagtgagaagtgaccagaagacaagagtgcgagccttctgttatgcccagacagggccactagagggctccttggtctagcggtaacgccagcgtctgggaagacaaccgttgccaagcagactgtggtctagcggtagcgtcagtgccaaggaaaaacacccactacttagcagactgggaaagggagtctgcctttccccgggggagtttagagaagactctactcctccacctcttgtggagggcctgacatcagtcaggctcacccgcagttatccagaggcctaaccatctccctgtgatgctgtgcttcagtggtcacgctcctagtccgctttcatgttccatcctgtacacctggctctgccatttagatagcagtagcaaaatcagtgaaagtactaaaagtccctgatatgcagaaataatggcataagctgtctctctctcctttctctgcctcggctgccaggcagggaagggccccctgtccagtggacacatgacccaggggaccttacctatcattggagatgactcacactctttaccctgcccctttgtcttgtatccaataaataacagcacagccagatatttggggccactaccagtctctgcctcttggtgatagtggtcccccgggcccagctgtcttttatctctttgttttgtgtctttatttctacaatctctcatctccacacacacggagaaaaacccactgaccctgtggggctagtccctacaccatacaaattttaggatttttttgtgaaaaatgtcattggtatttttgcaggaattgcattgaatctgtacattactttgagtagtatggacactttagcaatattaattctcccaatccatgagcattggatgtctttccatttattagtaatctcttcaatttcttccaccaattttttatagttttcattgtagagatcttttacctccttggttaaatttgttcctatgtattttatttttgttattattgaaaacaggattgttttcttgatttctttttcagatagtttggtgttggtatatagaaacactagtgatttttgtatgttaattttgtgtcctacaacttcactgaacttgtttaatctaacaggtttttggagaggctgtagggttttctatatataagatcatgtcttctgcaaacaaggacaatttgacttccttcttttcagttggatgcttttttttctcttgagatggagtttcgctcttgttgcccaggctggagtgcaattacatgatcttggctcaccacaacctctgccttctgggttcaagtgattctcttgcctcagcttcccgagtagctgggattacaggcatgcgcccccacccctggatgccctttctttctttccctggcctaattgctctggctaggactcccagtactatgtggaatagaagtggtacaaccttgtgtttttctgtattttagaggcaaagctttcaactttttccccattgagtatgatgctagctgtgggtttgttatatatggcctttattgtaaccaactatgttcctgctatatctaatttgttaagggttttcatcatgaaggcatgttgaatttgagatcatatggtttttgtccttctattaatgtgatgtatcatgtttattgatttgcatatgttgaaccatccttgcatccctgggatgaatcccacttaatcatggcaaatgaccttcttgatgtgctattttaaagaaatagcatcggccaggcccagtggctcacacctgtaatcccacctttttgggaagccgaggcaggaggattacctgagctcaggagtttgagactagcctgggcaacatggtgaaaccctgtcgctactaaaatacaaaaagttagctgggcatggtggagtgcacctgtagtcccagccactcaggagactgaggcaggagaatcacttcaaccaggtggaggttgcaataagctgagatcacgccactgcactccagcctgggtgacagagtgagactctgtctcaaaaaaaaaaaaaaaaagaaggaaagaaatagggtctatgttgcccaggctggacttgaactcctggactcaactgatgtttccacctcagcctcccaagtagctgggagtacaggcacgtgtcaccatgcccagctacagttctttaaatgtttggtagaatttgtaactgaattcattagatccagagctttttttcaatggaaaactttttattaattcaagcttgttgctcattattggtctgttcaggttttctaattcttcataatattggctggttatatgtgtccaggaatttatccatttcttctaagttttccatatagttgttcataatagtctctaatgatcctttgtagttctgtgataccaattgtgatgtctcctttgtcatttttttttttttttgagacactctcactcttgttgcccaggctggagtacaatggcgtgatctcagctcactgcaacctccgcctcccagttcaagtgattctcctgtctcagcctccctagtagctgggattacaggtgcccaccaccatgcccagccaatatttgtattattagtagagacagggtttcaccctattggccaggctggtcttgaactcctgacctcaggtgatccacccacctcagcctcccgaagtgctgagattacaggcgtgagccactgcacccggcctttgatctatttgaatcatctctctttcatacttagtctagctaaaggtttgttgattttgtttatcttttcagaaaccaactctttgtttcgttgatcttttgtatttaattctctagtttatttctgctctgatctttatttttttttcctttactaacttggggtttcatttgttctcatttttccagatttttagagaaaatcccttaatcagaaaggaagactaagagaaaaaggaagaaaagatctacaaaacaactaggaaaaagtaacaaaatggcagtagtaagcccttacctatcaataattaccatgaatgtaaatggattaaattctccagttaaaagacagactggctgaacggattaaaaaacatgacctaactaaagttggccattgaacaatatgagtttgagctgcaggagtccaatgtcatgcagattttcttccacctctgccactccgagtcagcaagaccagcccttcctcctcctctccctcagactcctcgatgtgaagaccacgaggatgaaggcctttgtgtgatgatcacttccacttgataaacattaaatatattttatcttccttatgattttcttgataacattttttctctaggttgctttattggaaaatatagtgtataatagattcaacatataaaatatgtgttaatcgactttttatattgttggtaaggcttcgggtcaacattaggctattagtagttaagttttgggggagtcaaaagttattcgcagattttcaactacatgggggttggtgcccctaaccctacatcattcaagggtcaactgaatatgttgtctacaaaagactcgcttcacctgaaaggacacacacagactgaaagtgaagggatgggaagatatttcctgcaaatgcaaagcaaaaaagaacaagtagttatatcagataaaatagatcttaagcctaaaactgtaaaaagagacaaagaggccattatagaatggtaaaatagtcaattcaacaagaggatataacaataataaatatatatgcacccaatattggaacatctaaatttataaagcaaatcttaaataaacctaaagggagagatagactgcaatacagtaatagtagaggatttcaacactccactttcagcaatggacagatcatccagacaaaaatcaacaaagaaatatcagagttaaactacactccagaccaaacagacctaacaagacacttacagaaccttccatccagtagccatggaatacacattcttctcaaaaccacatggaacattatctagtatagatgatatgttaggccataatacaagtcttaacaaattttaaaaagctaaatcatattatcttttttgacaatagagtaaatctagaaattaataggcagaacattggaaacaaatatttggaaattaagcaacatgctcctaaaccaccaatgggttgataaagaaatcaaaaaggaaattcgacacaaaggaaaatgggaatacagcatattgaaacctgtggaggctgggcatggtggctcatgcctgtaatcccggcacttttggaggccgaggcgggaggatcacttgaggtcaggatttcgagaccagcctagccaacatagtgaaaatacaaaaaatacaaaaattagccaggcatggcaatgggtgcctgtagtcccagctactcagggggctgaggcaggagaatcacttgaacccgggaggcagaggttgtagtgagccgagattgtgccattgcactccagcctgggcaacagagtgagactctgtctcaaagattaaatgaataaataaaaataataaaacctacaaatacagcaaaagcagtactaagagggaaacttaaagcaataaatgcctatataaaaaatatttgaacaattagtaaacctgactgactgtggcctgttaggaaccagccaaacagcaggagttgagtggaaggcaagcagggattattgcctgaactctgtctcctgtgagatcaacggcagcattaggttctcacaggagctagaaccctgctgtgaactgtgcatgtgagggatttaggttgcacgctccttatgagaatggaatgtgtgatgatctgaggtggaacagtttcatcctgaaaccaccccccacactagtgccaaaaagattggggaccactgaataaattgcttctgtaattagtaactttgctccaaagcaaacttctggtgaagatgacttcactgaatcgtgtcagacatttaagaagtaaatgctgtcagtttggtgtaaaatcttccagaatagaaaaagtggcaagacgagtataacttgagtacctagtctagcaagggaattatgataaaatcacacaccaatgtcattcataaaccttgatgcaaaggtcccaaaaaataaccagcaaatgaaatccatcaatacatgaaaactatatatcacaaatgattttgcttaaaagaaaatcagtgataacataataaggatacagatcatatgaccatctcaatttgtagaatatttgatgaaacccaataaccattcatttattaacaaaagtagctgggcatggtggctcgtgctgtgatcccaggacaggactttgggaggatgaggcaggaggactgcctgaggccaagagtttgagataagcccttgcaacacagcgagatcccttctctacaaaataaaaaataagataaaagccaacctcttagcaaattagagtagaaaagaacatctttaatttcataggaggtatttataaaaaaagcataaagtaaacattatacttgataaaacattgaagggttttccttcaaagtcaggaataagacaaggatgtctgccaccatcccttctagtcaaattgaatttaaagtttgtgtagactgatggccttcatggtaccaagtcttcaatttttcctatatccaccccctctgcaatgtgattctacagtttgtctaagatcatatctactctcctgctccttgaacctgggcttgtatgccgattcagcgcctgtgctgcaagagaccttacttgttactgcttattctctaactcttccgccatcgctatgaggacatgtctgggctaatctgctggaaactgaaatatatattagagctgaatcactccagtggtactagctcaagctagtctagattagccaagaggcagcccattcccttttatattagctgagcccaaaataatgactcataagctgtaataaaaaattcttgttttaagtcattgaagtttgaggtggtttgttatgcagcattatggtggcaatgagtcattgacacaaggtacaataaaatgaaaaaaatggtttagaaaagaagaaataaaactattatttatggatatgattctgtatataaaaaggaaaaaaatcaccgggcgcaatggctcatgcctgtaatcccagcattttgggaggcctaggtgggcagatcacctgaggtcaggagttcgagaccagcctggccaacatggtgaaaccccatctctactaaaaatacaaaactagccaggcatggtggcgtatgcctttagtcccagctactcgagaggctgaggcagaagaatcactgaacccagaaggtggaggttgcagtctgcgagatcatgccattgcactccagcctgggcaacaagagcaaaactctgtctcaaaaaaaaaaaaatctataaatacattactaggattaatgagtgagtttagcaaggttgctggatacagggttaatagaaaacaatattaatagcgtttctacataccagcaagaaataaataggtaataaaaaaataaagataacatttataataacaagatattttctgtgcctaggaatagatctaacacaaaagtacaaaacttctataccaaaacctataaattattattattgttattattatattggtgtcttttgatgaaaaaatgttctaaattttaatgaactcaaatttatcagttccctcatggttaatattttctaaaagctatttaatacatctttctttcttttttttttttttttttgagacagagtttcgctcttgttgcccagactggagtgcaatggcgcgatcttggctcaccgcaacctccacctcccaggttcaagccattctcctgcctcagcctcccgagtagctgagattataggcatgcaccaccacacctggctaattttgtatttttagtagagatggggt[136 bp omitted]gaagttattcttccacataacttctaaacactttataaatttgcctttcatgcttaaatctgttaatcctcatggattaacactgttcttgataataataatgattataggctgggcatggtggctgacccctgtaatcccagcactttgaaaggccaaggcgggcagatcacctgaggtcaggagttcaagagcagcctgggcacgatggtgaaacctcatctctgccaaaaatacaaaaaattagctgggcatggtggtgcatgcctttagtcccagctattcaggagcctgaggcgcaagaatctcttgaagctgggaggcagaggttgcagtgagccaagatcatgccactgcactccagcctgggcaacagagagaccctgtctataataataataatggttataggttttggcatagaagttttgtattttttttattagatctattcctaggcacttaaaatagcttcatgttattataaatgttatctttatatttttcattacctatttatttcttgctggtatgtagaaacgctactaatattgttctattaaccctgtat[136 bp omitted]atctccatctcccaggttcaagcgattctcctgcctc[220 bp omitted]tactaacctatctcctttttattataaaatacacatattccaaaaagtgtacaaaactgaaatgttcacctgaatgatttattgtaaagcaaatgccccaaccatcctagccaagattgaaatctgagtatcaggaaacaatatttaagattaaaagtaccgagcacattagagacgtatggtacatgctcaacacgcaaagaaaaaaataacagccacaagcctatatgtaccaaacaactggagagctaaatatttaaggcaaaacacgtataaaaccaaaaagaaattgatcaaaatataactacgatggcaattatcatacaactttttcagaactcacagatctaatagagaaaaaaaaggacatagagaaattgaataatgcaaacaaatacgatttaatagatacttagtcatattagaaatgaacaattttagggaagggagatggatttgtgaaccctggagtgcggttctgcctactcgaggccgctgctgtgtggagacccctgggtgaagccactgtcatcatgtctgaccaggaggcaaaaccttcaactgaggacttgggggataagaaggaaggtgaatatattaaactcaaagtcactggacaggatagcagtgagattcacttcaaagtgaaaatgacaacacatctcaagaaactcaaagaatcatactgtcaaagacagggtattccaatgaatccactcggtttctctttgagggtcagagaattgctgataatcatactccaaaagaactgggaatggaggaagaagatgtgattgaagtttatcaggaacaaacgtagtggggggcggtcattcaacggcttattctttttttattttccctcgatcctttaatcctttatttttaaaaatagttcctttgtaatgtggtgttcaaaacgcaattgaaaactggtaccccatctctttgaaacatctggtaatttgaattctggtgttcattattcattatcatttgttttcattgtgctgatttttggtgatcaagcctcagtccccttcatattaccctccttttttttttttttgagacggagtctcgctctatcgcccaggatggagtgctgtggcgcgatctcggctcactgcaacctccacctcccgggttcactccattctcctgcctcagcctcccgagtagctgggattacaggcacccgccaccacgcctggctaattttttgtattttcagtagagacgggctttcaccgtgttagc[132 bp omitted]cctttttcaggacattgcattttcaggcttgtggtggtgataagtaagatcggccaatgcaggtgttcataatgactttccaactggccctgatgttctagcatgtgattgcttcactcctggactgtgactttcagtgggagatgggagttttttcagagaactgaacagtggaaaaacgacctttccttaacttgaaggtacttttaaaatttgagggtctggaccaaaagaagaggaatatcaggttgaagtcaagacgacagatcaggtaagagtgatgcctaactccaaagatggcttcactgaagaaaaggcattttaagattttttttaaatcttgtcagaagatcccagaaaagttctgattttcattagcaattaataaagcaatacacgtagaaatgaataaggcagaacactgctcttttttatttgttctttttggcctgggatatgggttttaaatggacattgtaccagcttcattaaaataaacaatatttgtaaaaatcgtaaaaaaaagaaatgaacaattttaaaagagaaaataaccttaatgacttggaaattaagaaatatgcttctgtggtgagagggtcatttgagctcaggcgttcaagaccagcctaggcaacacagcaagacacccatctcatatctatatatctatctatatatatatatatatatatatatacacacacacacacacatacatacacacacacttccagataatccttggattaaaaagaagctaagtagaaaattacaaagtttccaggtagcataaaagtgtgtgtgtatatatatttccagataatcctatacacacacacacacacacacaaccccacacacacacttccagataatccttggattaaaaagaagtagaaaattacaaagtttctaggtagcataaaaaggagatttcatatcaaaacctttgacatacagcaaaaattacactttactgaagactaaagatgatgaataaaggaacttaatactccccttaagaaatcagaataggctgggcgcagtggctcacgcctgtaatcctagcacttcgggaggctgagacaggtggatcacttgaggtcaggagtttgagaaatcagaagaataaagacaaaacaaactagaaattgtaattataaagttgacattaataagatagaaaataaagtaaaaatgctaagtaaatccaaatgccacttgtgaatctgattgagaaaaagataaataaaaataacaaaatgtaaaaaatgagaaaagagacacagccatcaaatttagaattttaaggacatatgctatatgaaatcctaggtcaacaaatctgaaaccttagaggaaactgaaagtgtctggcaaatgtaaattactaaaaataatccaagaattttggggaaaattaatggaaagggttggaaagatgagtagagatttactgcacaaatgggctctgggaccagatgggttcagagatgagttcgatttaacctttaaaaagcagatggttctaatgtcaattacaccaggctgctcaaagtgtggcccacgaatcctaagcatcacctgggagtgtgataaatgcaaattaatgaacctgaatccagattcaccacataaaaatcactagcgggcggccgggtgcagtggctcacgcctgttatcccagaactttgggaggccaaggcgggcagatcacgaggtcaggagttcgagaacagcctggccaacatggcgaaaccctgtctttactaaaactacaaaaattagacaggagtggtggtgcacgcctgtaatcccagctattcgagacggctgaggcaggagaatcgcttgaacctgggaggcggaggttgcagtgagccgagatcgcaccattgcactccagcctgggtgacaagagcaagactctgtttcaagaaaaaaaaaaaaaaatcactagaagatggggcccaacgatctgtttaaccagctttccaggtgactttcagcatactaaagtttgagcagcactggcttaggatcacagaaaaaataaagagcgcctcaatttactttctgaagctagcataactttaatgccaaaatttataaaaagtagaaaaaaacccctcatttacaaagacgagatgaacaagctaaatattagcaagtagaatctagaatatatcaaaaggataatacattacacctaagtagaattgatcccacaaggagagttcaatatttaaaattctatcaacaagtccactaaatgctaaaaagccatttggcaaaatgcggcagttctatgaatatactaaatatcattgaattgtaaacttttttttttgagacggagttttgctcttgtcccccaggctggagtgcaatggcatgatctcagctcactgcaacctctgcttcccaggttcaagagattctcctgcctcagcctcccaggtagctgggattacaggcacccaacaccatgcccgcctaatttttgtgtttttagtagaggtggggttttgacatattgaccagggtggactagaattcctgacctcaagtgatccacccacctcggcctcccgaagtgctgtgattacaggaatgagccgccatgcctggccgaattgtaaattttaaataggttgattgtgtggtatatgaatcacatttcaataaagctgtcacagaagactatcttaggcctctggacaaaagggagcttgggagtgtctggtagacatctctgatagcaataactttccttaaccctacccttatggcagatacacctgacagcaataacttaagctgcctctgagaatgagggttgccacgtagaggttgctaggggaggatgctaagtgaaagtgccctatgaactgcatttttttttcttttttttgagacagagtctcgctctgtcacccaggctggagtgcagtggtaccatctgagctcactgcaaccttgcctcccaagttcaagcgattctcctgcctcagcctcccaagtagctgggactacaggcgcccgccaccatgcccagctaatttttatattattagtagagacggtttcaccatgttggccaggctggtctcgaactcctgacctcaagtggtccacctgcctcagcctcccaaagtactgggattacaggcacgagccaccgagtctggcctgaactgcatgctttttgcaaatggttgtagttctcctgtccagtccaccaccactggcccatgctgcaagttcccccaaataagccctgtgttttgtgtgctggctctgggtctcttcttcagcctcttgaacttggtgccatggctactgaagttaacaggcatttggcacgacaaccgatgatcccagcaggaggttggagaaaatcctgtgcacgcagagtcgatgggattggagaggagaatatcatcggggggcatctcgggctggctgtccacgtctgtgtggggcccaacagccactatccttgatggatgaggcccaaggcatgggtacagagatgcccccaaaacactgaagggtctggaagagctattgcaggaggtggatctaactaagcaaaagttagatgcctgagctgtggcagctgcggttggctggccactcctgactgtgctctgagcagcctcgggggccgggctcatggcgcaggtgaaggtgcatccattacaagatgaactgcgatgacaaagagatgcctaattagatcagactgaaacatcagagaccgactgtcctgcctgcaggcacgggatgacaaaatggagagaccctggcttgtcaggtatggtccatttgaaaagctgctggctgctatgtcaatgagttagggccctcatgactaaatcatcctgggaccctaagttctgggaccccatggagagctctagtggggaagagagtgaggcctgggatgagctcatggaggtgcccatcctctctgcacgtttgctggtcaacaccaagatgaaagccgaccaaccacagacatagggggtcaccctgcaagacttgcccctgcctggaagacaccatagtgcgggattccacggctgtggagttggtggagctgggaactaggttcaggaagaagggcagagagtcggtcacagggtggcttctctgtctatgggacatggaacagagatgagtgaaatggcatccatcaccaaccatccagccctgaggcggtgcctcgatggcaccaataatgacgatcgggccaccccctccttagccgggtggttgcaagctgcaa[211 bp omitted]gaggcagaagaatcgtttgaacccgggaggcggaggttgcagtgagctgagatggagccattgcactccagcctggacaacagggcgagactccatctcaaaaagaaagaaaggaatgtccccacatctcctttgtgatgacagattatggaggaattgagggacatcctctgggaattaggggtgatgcttgctatctacactgagcattaccgaggccctgacaaggagcttttcactgcgggcatgagaaatgccatcttacagtaggcacactaccaatggtgtggcacactggcgtctatcttgagtcccttcataggaatcacttgaacctgggaggcggaggttgcagtgagccaagatcgtgccactgcactccagcctggaccacagagtgagactccgtctcagaaaaaaaaaaaaaaggcaaaaaaccaagaatgcatccaggaggcaaggtggcttacgcctgtaatcccagcactttgggaggctgaggtgggcagatcacgaggtgaggagttcgagaccagcctgaccaacatggtgaaaccctgtctctaccaaaaataccaaaagttagctgggcacctgtaatcccagctactctggaggctgaggcaggagaatcgcttgaacccgggaggtagaggttgcagtgagccgagatcgtgccactgcactccagcctggtgacagagtgagactccatctcaaaaacaaaacgaaacaaaaaaacaagaatgtacaggctgttcccagcggatactggagctgaatgcactctcgtatgtggtgacatccgtggttccagtggcctataacaatagatggtcggtgggggcgggggtcgtgaaagtcagacaggttgagctagtattacaagttaggagactgctgcccaaaccctatttagtatacagagctcctatcccagattacatcttgggaagggctgtctcatcaggactgtgaccctctgaattgcgactgagttaggatggtgaggcgcgtgatcaaggggaatgcgaaatggacaccagcacagct[138 bp omitted]acggtgaaaccctgtctctactaaaagatacaaaaaattaaccgggcgcggtggcgggtgcctgtagtcccagctactccggaggctgaggcaggagaatggcgcgaacccgggaggcggagcttgcagtgagctgagatcgtgccactgcactccagcctgggcgacagagcaagactccgtctcaaaaaaaaaaaaaaaaaagaaaagaaaaaagaaacgacaacacctgccaggaggtcatgatgagatcatagggactgaaaaggaaagaagtctgggtagacattataagaccagtgaacagcccatacaatagccctgcatggcccatgtggatgcctgatgggacacggagaatgacatattactgggagttcaacaaagccgtccccctaatgtatgcagctgttctcatatcgcctcctttcttatgaggataagagagggactgcacgcacctcattttgtcattgcattcacctggtatattagtccgttttcaagctgctataaagaactgcccaaaactaggtaattcataagggaaagaggtttaattgacttacagttcagcatagctggggaggcctcaggaagcttacgatcacagcagaaggcaaaggggaagaaaggcaccctcttcacgaggccgggcgaaggggggaagagccccttataaaaccatcagatctcgcgagatctcactccctgccacgagaacagcatgggggaaaccgccccaatgattcaattacctccacctggtgtctctgacacgtggggattatagagatttcaactcaagacgagatttggatggggacacaaagcctaaccctagctgggcgtggtggcgggcgcctgtaatcccagctgctcaggaggctgaggcaggagaatggtgtgaacctgggaggcgaaagttgcagtgagccgagaccacgccattgcactccagcctgggcaacagaacgagactccctctcaaaaaaaaagcctaaccttttcacctgggaaggagaacaatatacctttactgtcttgccgcggggatatttccatagcctcactatctgtcaacgcctagtggccacagacctcagtagatggactaccctggagagggtacatgttttcctttacattgatgttaaattctgagtcttttgccagctaacttctgagtctctatagccctcaccttgctgtctcacttggttaacagaggatgggcggtcaatgcagacaaaggcagggtccaggcttatcagtccaatacttggtgtcatctggttgggtaagactaacggtgttcaatttgccattctacatatggtgcaggcctacccacatcctacaccaccaaagtggctgcaaaccttcttagttcttctaaggccgtggtgtccttttatttcccatttggctcaactccttaggccactgtaccacttagtcaagaagggggccaactgggaccagtggcaaaggcaaggacacaaacttgtacctttaggattctggttccagctatggaaggggactgaagttacagtgtcagggagctataattctgcactacgtgttatgccttacagcaagtggaagatgttccaaaggggttcccatgctagtacatacccagtaccccatagtaggttagctgggattacaggtgcccgccaccacgcccacctaatttttgtatttttagtagagacagggttttgccatgttggccaggctggtctcaaactcctgacctcaggtgatccgcccaccttggcctcccaaaatgttgggattacaggcgtaagccgccacgcccagccagcctgtgcattcttaggtgaccaatatatagttagctagctctatatgtggccgccagtctccagacactcagccaccattgctcttatcgggatcctgaggccttagcctttatcctagtcgaaagtaggacaccttccagaaaccaaaatctgggaatgcccagaaacagattgtggccaaatggcacgcatgcctgcaacagaggagtacacgaactagcacagggttccgtttgctgcttggccctgtcacctatgtgacagctgaaggacagtctttgacaaggcactgagcctccacatattccctcctttatataagagggacaggccccaattcctgaccaggcctggtacacagatggcttgtcacgaggcaatccttccacctgtatccagctgtccactgagagtatctggctcgatacaggcaaaggacatgtagccaatgggctgagctgcctggatggtttcttctaggagccggacccaacagtcctgtgcactgacatctgggcaccatctttaaggggcccaccatgtgcctactacaaggagaaacacaggattggatggtagcaggcagccccctttggggggctgatatagaagaacattctccactgcacctgggggatgcatgtaacagtctagcgtctggatgcccacactgcataatatccctattgtcttactccagcctcatgtgacactttgtagagagggggccaacctatttggtattgcaaaccaagcaccaggccactctcggggtgatgctgtctcagaaggacacaacttcctgtttcttgtaaaatgaccatgaggctgggtgcagtggtacatgcctgtaatcccagcactttggaaggccgaggtgggtggatcacctgaggccagcagtttgagaccaacctggccaatatggcaaaacgccacctgtactaaaaacaaaaaattagctgggcatgatggcgggcgcctataatcccagctacttgggaggctgaggcaggagaatcgcttgaacccaggaggcggaggttgcagtgagccgagatccagctactgcactccagcctgggcaacaagagtgaaactctgtctcaaaaagaaaaaaatgaccatgacttgccccttcttgtactcactaaacatctcacttttcacccatagatggtatgcagcaaacctcttgccagctgagcacagacggtggtctctctccagaacaaaacagactgttgggtctgcagagagctgcccctctcctccactgcgggcctgccgtggtgcctcgcagcagttaacctgagtacctgaagccacttttatattcattattttttctgttgtagtttgtattgctgctgtggtgtctggctgcaatgctcctccgcatacctggccccagggaaatggtggaagaacggtacaagaatgtgagggccattcaaaggtatgctagagtggccaggtcgcagtggctcacgcctgtaaacccagcattttgggagggccgaggcatgtggatcacttgaggtcaggagttcaagacaagcctggccaacatggtgaaaccccatctctactaaaaatacaaaaattagccaggtgtggtggcacatacctgtaatcccagctactcaggaggctgaggcaggagaatcacttgaacctgggaggcggaggttgcagtgagccaagatcgcaccactgcactctagccttggcgacagagtgagactccgtctcagaaaaatgaaaaacaaaaacaaaaaaaacacagcaaggtgggtatgctggagtgagggtatatggtagacgcacctggcagcaataacttaagcacaccctgaggataagggctgccgcatggaggttgctgggggagggtgctgagtgaaagtgccatataaactgcatgcattttgcaagtgggtgtggttctcctgtccagctcatcaccactggatcaccctgtaagttatctcaaataaaccctatttctcgtttgctagccctgggtctcttcttcagcctcttgaacgtggcgccatccctattgaagcgtcccgcatgtcagggatgcaaattagaaagcagaattaggccaggtgcagtggctcacgcgctttgggaggctgaggcgggcggatcccttgaggccaggagttcgagcccagcctggccaacatggcaaaacccctatctctactagaaatacaaaaattagctgggcacagtggtgtgcgcctataatcccagctacttgggaggctgagacataagaatcgcgtgagcccaggaggtagaggttgcagtaagccgagatcgtgccactgcactccagcttgggcaacagagcgagactgtctcaaaaaaaagaaaaaaaaaaggctgggtgcaggggctcacgcctgtaatcctagcactttgggaggccaaaatgggcagatcatgaggtcaggagttcgagaccagcaactctcgagacagggctacatgtgactctcgagactgtctcgagactgtctagagacagggcaacatggtgaaaccctgtctctactaaaaatacaaaaatagctgggcgtggtggtgcacccctgtaatcccagctactcagaaggctgaggcaggagaattgcttgaacctaggaggcagagtttgcagtgagccaagaccgagacactgtactccagcctgggcaacagagcaaggctctgtcaaaaaagaaagaaagaaagagagagagagagagagagagagagagagagagggaaacacactaagagagaaataaaatattttttctttctttctttgagatggtaagcccctacttttcaatccccctctcccaagttccacctccaaaactggaccggggatggtggggaggtaggtgggaggggccttgaggcagaagggaggatgagtgccctggttcccaaaagggaggaggttgaagacccagactatttgatgagaaggaggagcccaccgccttctctctcccatccccacattacccgattcaatagtgcaagtcttcaagcagatagagcatttggaatttggggggtggatgggctggcctaatagggcacaggagccaatgggtgatgacacagaggtgcacgcccctccagccctcctatcttcaagcttgaagagccagacttcagaggtctggaaacttcagatgcctctgctctttcctttctgcagatccacctcttgagtcctgcctgccaatggttgggggtgtcttcttttcctttatcactgaaacttacccgtgggctctaagcaatctaaaagcctgagatctctgagcatttaagggaaacccattccctggatctttgggaatcccaatcacctctgtccacagcccccatccccagcaggtaactgacaggccccccagtctccttttggggagtacttcagcaccctcatggcactaccctcccacaagttcttaaagacccactcagtgatcatccactgggcaagttcagttgatttgaccctgggataaaaaccagtggtgcccagtactgagcagaaatgggactcttggtgagctcagtgaaacagcttgttagtaactggttgtggcactgatttacagatgtactcagtccacaacacaatgttcaaaccttgagtgcaacctctttttagaaataattttagacctataataggattatcatgtatcagtagcaagcacattaatatcttccccatctttgttgaagtcaccatttcccaggtttcccttggctaaaggccagcccgtggataatgcaagcctggtaatctagtatctgagtttgccagagcaaggggagggcaggaactcagggctggacatttagctttagaaagactgtgatatggtttggctgtgtccccatttaaatctcaacttcagttgtatcttccagaattcccatgtgttgtgggaggaacccagggggaggtaattgaatcatgggggctggtcttttccatgctgtctcatgataatgaataaatctcatgagatctgatgggtctatcagggatttccacttttgcttcattttctctcttgccaccaccatgtaagaagtgcctttcacctcccgccaggattctgaggcctccccagccatgtggaactgtaagtccaattaaacctttttgttcccagtttcaggtatgtatttatcagcagcatgaaaactaatacagtaaactggtaccagtagagtggggtgttgctgaaaagatacccaacaatatggaagcaactttggaactgggtaacaggcagaggttggaacagtttggagggctcagaagaagacaggaaaatgtgggaaagtttggaacctcctgaagacctactgaatggttttgacaaaaatgctgatatgaacaataaggtccaggctgaggtggtctcagatggagatgaggaacttgttgggtactggagcaaagatgactctttattatgttttagcaaagtgactagtggcatcttgcccctgccctagagatttgtggaactttgaacttgagagagatgatttagtgtatctggcagaagaaatttctaagcagcaaagtattcagaaggtgacttgcgtgctgttaaaagcattccgttttaaaagggaaacagcataaaagttcagaaaatttgcagcctgatgatgcagtggaaaagaaaaatccatttttgaggagaaattcaagccagctgcagaaatttgcatgagtagcaaggagcctaatgttaatcccttagaccatggggaaaatgtctccaggccatatcagagacattcatggcagcccctcccatcacaggcccagaggcccaggaggaaaaagtggttttgtgggccaggcccagggtccccatgcagtgtgcagcctagggacttggtgccctgtgtcccagccactccagccatggctgaaaggggccaacgtacagctcgggctgtggcttcagagagtagaagccccaagccttggcagcttccacgtgatgttgagcctgcgggtgcacagaagtcaagaattgaggtttgggaacctccgcctagatctcagaagatatatggaaatgcatggatgtccaggcaaaagttttctgtaggggcagagccctcatgcagaacctctgccagggagggaaatgcagaagggaaacgtggggtcagagccctcacacagagtcagagtccctactggggcactgcctagtggagctgtgagaagagggccactgtcctccagaccccagaatggtagaaccactgacagcttgcaccctgagcttggaaaagccacactcaacaccagcccgtgaaagcagctggaagggggactgtaccctgcaaagccacgaggtggagctgcctaagaccatgggaacccaccttttgcatcagcatgacctggatgtgagatctggagtcaaaggagatcattatggagctttaaaatttgactcccctgctagattttggacttgcatgggccctgtaacccctttgttttggccaatttctctcatttggaatggctgtatttacctgataccagtacccccattgtatctaggaagtaactagcttgtttttgattttacaggctcataggtggaagggacttgccttgtctcagatgacactctggacttttggattaatgctgaaatgagttgagacattgggggactgttgggaaggcatgattgcttttgaaatgtgaggacatgagatttggaggggccaggggcagaatgatatggtttcactgtgtctccatttaaatataaacttcaattatatctcccagaattcccacgtgttatgggagggaaccaggggaggtaattgaatcatgggggctggtcttttccatcctaatctcgtgatagtgaataagtctcatgagatctaatgggtttatcaggggtttccacttttgcttcttcctcatttttttctcttgctgccatcatgtaagaaatgcctttcacctcccaccatgattgaggcctccccaaccatgtggaactgtaagtccagttaaacctctttttgttcccagtttcaggtatgtctttattagcagtgtgaaaatgaactaatacagactggaagccttgtgacaggaaaactgaacatctgagacatctataggaaaaaaagatctgcttacatccagtccttggagttccagtagactgatttattcaccaacagcattgctcctccagctccattccaggagacaggcaccccagaagtagcaggactggtagacatcactagtattgtatatgtgttgtgcatgtatgtgtgttgaggaagaggatggggaaaacaatgatggtggtcaccaggtaagatgggacccaggaagggattgcaagtccaggccccatgaacacccccaaagaatgcccctcctcttggaaataaaagtggttctggatccagggagatcaacagttgcaagctgatattaagagttgtctattggatctgttctaagggatatgttatgtgaagccaaattaatgaagttaggaagtcacattacaagttgatgggtactttgtttcatcaacttgtagaatttcttccttttgaacctctttactgggtgttagctggtgacttaggggtagggatgtggaggctgtcataggcccgtctccgctcttgggcctgaagggaatcctatgtatgcggcagtatacaaagtatgcagggatggggaggatgacaatggcaaaaagggtgatcatcaagagcagtgcccacggtgggtatggtcgaagcacctcttttgactgtggagagatgggaaaagggttcagaatatcaaaatccccaagagaaaaggaagagttgtggaggggaaggatgggtggggaaccaaagcagaaaacccatgagtcttcgggcagtaagagaatgagatgactgggttctttcacccagagtgaattgaaaggtctggcccctactcccaaaggggttctgggtcctgggggaggctcacggtgcttgagtcccaggacatgtaggtgatcggcttcatacaaagatgaaccatcatggtcacaaagatgattagcagcacaactggacacagatggggccacagccaaccaaagatgggagagatggggtggcccaacaggatcgtcaggtctgcaaggaacctggagaagggccaccagagtgtgggatgcccagttaggcctcaccaccttggaggcagggccagcccaaccttggcatctttcaaacattctattgtatctctaatctcctgtttcatctcaagtcttgtcctctctcatcttccccctagtcagtctgtcttctatcctaacccaagaaacttttccaaacacccctctcctgctcaagaactttccatgggtatccaatggcctcaggagaaaggccaagtctctttcattcatcccataaatatgagaatgtctatgatgtgccaggaactcttctaagtgctggatatccagcagtgaacaacacagataaaataaagtggcatttggcccttggtgaacttatctagtttatttcagccacctatccagtctcctttagtacatattctcaatctcaataaatatacaagtggggtcttttggtctagggtgcccatcaccctatctccacctattcatctgtccaggctctgctcaagcatcctcttctctaggccaccttccctaactctccagtcttccttaactaaccatctatgcccccggagtttccctggctacctctactatagacttaccaccgggtactgggattttctgcttatatacgtctttctctttggactctgagctctttgagaagagtatctcaatgtaagtcattcatatcccagtaccacaaggctttcctgacacaaagtctcaagaaaatgtttgttgggtgagttaataaatgagtccataagtgagcaaactgactccaagaaccactatcagatgaaaatgctgaggctttcacccctgaattataccaggaactcttctaagtgctggatatccagcactgaacacagataaaagaaagtggcatttggcccttgggaaacttatctagtttatttcagccaactatccagtctcctttagtacatattctcaatctcaataaatatacaagtggggtctcttggtctagggtgcccatcaccctatctccacctattcatctgtccaggctctgctcaagcatcctctcctctaggccaccttccccaactctccagtcttccttaactaaccatctgtgcccccggagttgccctggctacctctactatagacttacattccacagctatatcttccaggtctcactcccagattatcttgttctctttcccaggtagctctaccttccagaatcagaccacttctcttaatccacaactcttctacttttgaccaagccattcttagctctcacttgaaatattacatagctttcaccaggcggggtggctcacgcatgtaatcctagcactttgggaggctgaggcaggtgatcacgaggtcaagagttcgagaccagcctggccaacatggtgaaaccccgtctctactaagaatacaaaaattagccgggcgtggtggtgaatgcctgtaatcccagctactcagaaggctgagggaggagaattgcttgaacccgggaggcggaggttgcagtgagctgagatcgcaccactgcactccagcctgggcaacagagcaagactccatctcaaaaagaaagaaaaaaagaaatattacatagcttccaactcttatcctggcttcactcttgactcttcctggtctgttctccagacagcagccataaatacctttttaaaaaacaaatctaataatggcactcccacctgaaaatgtcattctcctactcaaaaccctccaatgcttcatctgccattctgcatacaaagctgagtcctatcgtggcttacaaaaccctacatgacttggccaccatcacttctctagccccatctcctaatatcttctattccagcctctctgacttccttgtttctcaaaaactctaggcattatgcttcctctggccttggtaatttctgtttccctgcagggagcactttactcaaaatcttgtcatgactccctccctcctatcattcaggagtctgctcacatgtcaccttatcggaagggccctccctgaagtcgtatgtgacttggtgcccacacacactcccactatgtgccatctgacctcatcctttgattcttcctatcgcctgtatttattctcaacgtttttattctttatttgctaatctggttattgtctctctagaccactaaaatgtaagctttctgagaataggaatacttcttttattcaatgcccctatccctgatgactaaaatagtgcctggcacatattcagcacccaaaatatatgtgaaaatggatgaatgaataaaaagatttcccagaagactctgaacttaagggtccctatgtcacactaggtgggttgacagtagaggcaacaaaaaaggggtcacccttccctatagtcccatgctttgtgagaacctgggcttaggacatcacctcctggccccataggcccaggatacagccatggtttcaaatacgacaacgacgatgatggggaagactatccagtagtcactcagcagtctgatgaagtagctgcctgaaggtcgagtgaagaagaggccgcacacgaacatgagcaaaaagactcccactggagaaaacatgagatctggatcaaggttagaagtcacggctgggtgacaagggctaagtagaggccatagaccagggctggtggcagacccagtggtagccgggcgagggggcttacatgtgtaatccaagcattttggggagcctaagtgggcagattccttaagcccaggagtctgagaccagccaggcaacatggtgaaagcccgtctctacaaaagctacaaaacttagccgggcgtggtgatgcacgcctatggtcccaactactggggaggctgaggtgggaggatcacttgaacccaggaggcagaagttgcagtaagccgagatcacaccactgcactccagcctgggctacagggaccctgtcccaaaaaaagagtcccagtggtgtcaggggtcagggtcattgttaggagtagggcctaggtcagagtacctatgagcagctttgtatgtttcctgaagaaagagaaggtgtcctggagtggagtaatgatgccctgcataatccctattgcgctgctcagccccatggccagcaacatcaggaagaagataaaagaccagaagacagacggaggaaggaaggacatggcttcaacaaaggacaggaatgcaaactttgggccctcgctagcctgcaaagagaacaaagaggtgttaaagtgtcattgaactaaacaataacaaaaaaatatagacaagtatacattctatcttccctggaaaactcctgaaaatccctggatcactgagaaaatcagatgtccaagctaaccccctgacatggaaaatcaatccacctagcattatccatggaaggccattccgcaaagtatagtactttgtattactgagagccacagatgattctggtgcttccgggatttttgctggtgctaataaaagctaaaatttctgttgtgctaaaggctttcaggaactctaggctcccccctcagctatgtttactgaccttaagaaactgagtctctatgttgcactcagtcacctcgcggagaaccatgcttttgatgtgctggggaaggccactgagccaggcattgtagatggaggttgggttgtaaagcaggttgacagggggcttggcatcaggaggcagtttccctaggtttatcagctttaaaagtatttcagcattcctggggatagagggttgaatcaaatcgaaccatttggcccagtaggagatagtctccttttcccttatcttcaagataaaaaaggctatcactggcttagcattactgatctgggtaagatagagcctgggatgaatcctagaaggcacccgccttcagggacgtgaattcgtttgtgtaatcctggagaatttatgaccatgggagagcctaggagaagcattttctacagtcttcttggggactctgtggtctctgctctagtgatgggatttcttatacgctgtctaccttccctctccactgagactaacgggtaagagccaactttctaaagttcctattacagcatgtccgggagcacacagactatgatcataatgtcccatggagtcgtgctgtgtggcagcaactgcttgttcgactttttgatgtgagccctgctgaccattttggcctcatatgtccctacggccctcttcacattccatgttctggccagatttaactacttaccgtgtcagggcccatcataccccatcacacacaataccaactccacccccaccaccattcttcacttggctaactcc[134 bp omitted]gaggcaggagaattgcttgaacctgggaggcagaggttgcagtgagccgagatcgcaccactgccctccagcctgggcgacagcgagactccatttcaaaaaaaaaaaaaattcagctcattgctctgtaagaactgcaatggacagcttgccaaggttcactgataaaagcaaaaggcaagcaagtagagtttgatcacattttagaaaataaaatactatatgctattccagtaataagctagagatttgaaccaattttctcatcggaaataatttaaaaggctggaagatatttttaaatcttctaacaaaataaaaatgttgacaagataataaggaattatcaggcaaacattgaagtacaggcaaagcagtggagaaaggggacttccaaagatactttgtcccaaagatgtatgccaaatacaacaaactggacctgcagtttccaattttatgacttttcagatacaaaagggggccatggaggccagatataaaacaccagagcctgcccaaaataaggatcagaatagaagttcccctcttaaatctgacacttcaaagggctacaccttcacaataaaaatgaagcagaagcttgctcctggcccttctacacaactgggaatgcaaggaaagctgtttcagaaatgatctacagatttgatgcaatcccaattaacaccatagcaggctttttattttctttttctttttttttgagatggagcctcgctctgtcgcccaggctggagtgcattggtgcgatctccgctcactgcaacctccgcctcccaggttcgagcgattctcctgcctcagcctcccaagtagctgggacaggcgtgcgccaccatgcccagctaatttttgtatttttagtagagacagggtttcatcgtgttggccaggctggtctcaaactccggacttcaggtgatctgcccgcctcagcctcccaaagtgctgggattacaggcatgaaccaccacactcagtctgggaaggtaattctaaaatttacttggagaacaaagatctacaatagtcaaaacgattttggaaaaaaaatagcacagttggagaactcatacaatctgattttaaggtttactgtaataccttagtaatcaaagcagggaggtattggtgtaaaaaaaatagacatgttaactaatgatactgagtagagcccagaaacatattgtggacaactaattgtcaacgaagataccaaggcagcttaataagaaaaggatagtcttattaacaaatagtgctagaacaactgaatatctaaatagaaaaaaatttaattttgatccttgcctcataccttatacagaaatttatgtgaaatagatatctaaacagaaaaagcaaaaactttaaaacacaggagaaaaatctttgcaatcttggccaggcgcggtggctcatgcctgtaatcccagcacttttggaggctgaggcgggcagatcacttgaggtcaggagttcgagaccagcctggccaacatggtgaaaccccatctctactaaaaatacaaaaattagccaagcgtgatggcgggcgcctgtagtcccagctacttgggagactgagacgggagaatcacttgagcctgggaggcagaggctgcagtgagccaagatcgtgccactgcactccagcctgggcaacagagtgagaccctatctcaaaaaatatatatatatttgcaactttgaggtaaacagaactgtctgaggatgtaaaaagctcaaaacatgaaagaaaattgataaattgggcatcatcaaaattatgtcttttcatcaaaaggcttcattaacgaaagacaaaccccagaatgagatataatatccacaatatgtacaactgacaaagaacttgcatttaggatatataaagaatgcttacaactcaataatttcaccgcccaaaaaaaaccctgatttttaaaatggacagtagacttgaaaagatactttacaagacaagctctgtaaaaggccaataagcactttccaaggtagccaacattagtagtcctgagaaacaggcaaattaaaatcacaatggcataccacaccacacatctgccagaatggttaaaattaaaaagcctgatgtcatcaagtattgacaaggatgtgggacaaccagaactctcataccatactagtaagaatggaaaactgatttaaaaccactttggaaacagttccacaaattcttatgaaattaaacataccgttaccacgtaacccagtgacccaatgatccttctcttaggtgtttatccaagagaaatgaaaacatatgtccatacaaggacttgtacatgaactctcaaagcagctctacttgagacagccctaaactggaaacaactcagatgcctctgagtaggagaatggatgaagaaattgtggtataatcataaaatggaataatacttaggaataaaaaggaacgaacctccaatacatccagtatcatagatgaatactaaaaacatgctaagtgaaagaagtcagatataagaatgcatatagtatgattctacttactctgaagaaaaaaaaagacaaatctaatctatgatgatagaaaacagattggtgattaattggggccaggagtgagaggaacataggtagaaaatatgagagtttctaagacctagatgatatagtaaaaaggtctaacaaatgagatgacatggccagtgagtcagagacaatatgtgaacaaacaatggctgagaatttttggaactaatgaaaaaagtaatccatagatgcaagaagccaaaagaatcccaagcaaaataaaaggaattccccattagatatattacagtgaaggtgtagagaaacaatgttaaaaggtacctgtgcattggcaaataatttatgaattaaaagtccttaaaagcacttgcaacaacaaaaattgacagataagtgggatccaattaaactgaagagcttctgcacagcaaaagaaactcaacatgaaggagagaaaatatttgcaaactatgcatccaacaatagtctaatatccagaatctatgacaaacttaagtaatttgataagcaaaaaataaataaccccatttaaaaaatgggcaaaggacatgaacagatacttctcaaaagaagatatacatgcagccaacaaatatatgaaaaaatgctcactggtgtgtttctcaccacaccaatcagaatggctattaaaaagacaaaaagcaacagatgttggtgaggctgcagaggaaagggaatgcttatacactgttgctgggaatgtaaattagttcagccactgtgggaagcagtttggagatttctcaaataacttaaaagggaactaccattcaacccagcaatcccattacagggtctatatacccaaaggaaaataaatcgttctaccaaaaagatacatgtactcatatgtttatcacagtactattcacaatagcaaagacatgaaatcaagctagatgcccaacaatggtagactggataaagaaaatgtgatacatatatactgtggaatactatactgccatgaaaaagaacaaaatcatgtcctttgcagcaatatggatgcagctggaggctattatcctaagtgaattaacataggaatagaaaacctgccgggtgtggtggctcacacctgtaatcccagcatttgggaggcagaggcaggcagatcacgaggtcaggagatcaagaccatcctggctaacacggtgaaaccccgtctctactaaaaatactaaaaaattagccgggcatggtggtgggcgcctgtagtcccagctactcgggaggctgaggcaggagaatggcgtgaacccgggaggcagaggttacagtgagccgagatcgcacctctgcagtccagcctgggcaacagagcgagactccgtctcaaaaaaaaaaaaaaagaaagctgaaagatgccagaagcgggctcatgcctgtaatcccagcattttgggaggatgaggcaaaccgatcacttgatgtcaggaattcgagaccagcctgagcaacatgaggaaactctgtctctactaaaaatataaaaattagcctggtgtggtggcatgtgcctgtagtcccagctactcaggaggctgaggcacaagaattgcttgaacctgggaggcagaggttgcagtgagccgaaagcctgggtgacagagggaggcttggtgtaaaaaaaaaaaaaaagaaagaaagaaagagaaagctgaaagatagtaggctatcttcaatgtgctaggaaaaaaaaaaaaaaaaggcactgccaagctagcaatctatatccagatacaatagatttcaaaacacagtgaaagatattttcagaaaagaaaagtag[138 bp omitted]atggtgaaaccctgtctctactaaaaatataaaaactagccgggcgtggtggtgggcacctgtaatcccagctacttgggagtctgaggcaggaaa[135 bp omitted]ccaggatgcaagatagaataaagatcaaagaaagcaataaataggaagtagtacatctaattgaacattaactatataataaaacaataatatctttgcattttagcaaaataatatgaaataaaaatacatgaggtgcatgcttgtaatcccagctactcgagaggctgaggcaggagaatcacttgaacccaggaggcaaaggatgcagtgagctgagattgcaccactgctctccagcctgggtgacaaagtaagactccgtctcaaaacaaaacaaaaacatgatataacattcaaatgtaagttaggaatgcatgtaaatggatataaagagttttggagcccttatcttgaaagacagtgaagtactgattacctttagacatcgataaattaagaatgcatattgtgaattctggggaaatcactaaatcactgaaagaacagaaaacagagtggataacttccagactagtggaggaaaaaaaaaatggaatgataaataactactaagtcaatccaaaagaaggcaagaaaagagaaaaaacaaaatacagaccaggagaaacaaatagcaaagtaagatgggagacagagccaattatttcctatcatgatggcagagaaagggatccagcctccctttctctataaagagcaacaatttggcaactatccttgaacaacaattactctgggccgggcgcggtggctcatgcctgtaatcccagcactttgggaggttgaggcgggaggatcacttgaggtcaggagttcgagaccagcctggccaacgtggggaaaccccgtctctacaaaaaatacaaaaattagctgggcatggtggcacgttcctgtaatcccatctacttgggaggctgagacaggagaattgcttgattccgggaggcggaagttgcgtgagccgagatcaggccactgcactccagcctggaagtcagcgagactccatctcaaaaataaataaataaataaaataaaataaaaattactctggaagaattgagaagtcggcttcagctgacttttagtgggagaaagaaccctagaaaaacccatacagaaagggtggaaagaacaattccattttgcccacatcaccccatcccccgagccagcactgctcagcatggagagggaattccctggctcgcataaccctctttcagggataatgagagcaggctataccaccagcttccctagtgttttgggacactgcccaaccagcttcagtttcactccattcacatttccgtggggactggcattgccgagacttacggagataatggggaaccaagaagtgggacaggctgtcagtatcagccatgctggtgggagccacagcgccccctagtggcctgctcaacacgggtctctagcacacttctgtactgaggacctcaacagcactcctggccactgtgcagctccccacagttttcaccaccaaggacaccttggtgttaccaatggctgatgccagcaccattttctgcagaggaaccaagcagctttcacagctgaggaaaccaactgccagcactgcagcagcaaaagccctgtagttttttccaccttcacagtctccaggtgcctggccctctaatttctccttcctctgtccctgaaaccacctaagctgttcaataccatggtcacccagaccagacccagggactcaccccagtggccatcgcattctctgggtgcctaagccaatacccctcctctatggagtcaccccagctgctgcctctacaagtgctctgagccaaggacccagcacagctaccatgcatgtgcctgcacacagccatgcctccccatccccaggttctaactccagcatcacgtttgcaccctcagctaggccccgcggctgcatgtgcacacacgcctccagctcagccctgcaactgcccacgtacatgcagatggactgacctctgtggccagactgcagcaggcccctgcagttaggcacaagctgtcaggccccactgccacatgcatgcccttagtcaaccccagcccctgcctctgactccaccccttgccaccattaatgagcctgcaactagcctctgctgccatgcttgtgcctacagccagcctctgcagcagagtgtgtgcacaccactgaccccagcctccactgctgcgagtcctggcccctagatgctaggcaagaggcacagctgaggtcccagaaaactctgtgggaggttcacagccactgtggacctcccacagctgttgccaccaaggaccatgcaggtatcaacatcacagcccccagctgcctgtgctaacaagactctgtgtccctccaacctggacccaccacacgcacccccacccacagttggcactctgtgccactggacccagtgccagagagcaccactcttctccccaaaaaaagcatttgaagttaatgcttcttcaaatgcttttctcaagactataaaaatcatgaagaattggagaatcatgataacaccaaaggaaaacaataaacttccattagctgactccaaagaatagcagatccactaattgcctgacaaagaattcacaataatggttctaaagaatctcagtcaattataaaagaacagagaaaacaatttaacaaaatcaggaaaacaatagaacaacgaaagaagaggctaaacaaaggcactgaaaatatgaaaaagaaccaaacaaacatttttgagctgaagaataacaataaacaaaaaatacaatagatggcttcaacagctgactagaaaagcagaagaaagaataagcaaattcaaagacatcattttaaatcatccagtcagaggagaaaaagaaaaagaaatgaagataaccaaagaaagtctacaatatctatgggaggccatcaagagaacacttacataacaagatttacagaggagaagagaaaaggacaaagtttatctttaaaaatagctgaatacttccctaatctggagaaagatacaaacatccaggtacaagaagttcagaggtctctaataaaattcaacccaaagaagagttcattgagacatattataaacaaattatttaaaactgaagacaaagaattctgaaagcagaaagagaaaagcatatcacatataagggagccccagtacaagtatcgacacatttctcaacagaaatcttgcagtccaggagagagtaagatgatatattcaaagtgctgaaaaaaaatctgacaaccaagaatactttaaaaagtatgtaggccgggcagggtggctcatgcctgtaataccagcactttgggaagccaaggcaggcggatcatgaggccaggagttcaagaccagcctggccagtatagggtttagtagaaaccctgtctctactaagaatacaaaaattggctgggcatggtggcgcccacctgtagtcccagctacttgggaggctgaggcaggaggattgtttgaacccgggaggcagaggttgcagtgagctgagatcacgccactgcactccagcctgagtgacagtgtgagactgtctcaaaaaaaaaaaaagaaaaaagaaaaaagaaaaaaagccacaccattagaactggtctcatctaacgcccttcagtcatttgatttatacaagtgataaggtttggggcacaaaactattatcatattactattaattttactttatatttgccctttttaaaactttgtatctgtcacttgttaaatttttacagaagtacaactcctaacaaaataatgctggcccagccaaacactttgagatgataacaaaagactatggaacagacaaaattgaacttcataatggacctcagatagacttagcctaagagatacccccttcaaatgtcccttgttgctcaaatgtggctacaagagtttgacactgactccaagtcacccatcattcccctcaatgtgacatgagaccagcaactgggacaggcccatcatgacattgagggacaggaaaacccaaatatgaatgattgatcagtgatgcttttggagaaagatcttgattaaaagaggaaatgtgaacgttatcagaataaaatggagtcactaatgttaagaaagccctagcaaattgagtcaaggaaggccataaagagagggttctcacacttgtatgtctgattagaaaaacaactacaaaaactataaccacgcataaaggccactgcaaccttacacacacaaaatattcctgcagaaacatctgcccaacaaacgcctatccaatcttggactggtgtcacccttgttatcgatctctgtagtcaaggaaaattatttcaaaacaattatgttatcctcctcatttttttcctttaaaaacctttgttggctgggcgtggtggctcaagcctgtaatctcagcacttcgggaggctgaggtgggcggatcacctgaggtcgaaagttcgagaccagcctgaccaacatggagaaaccccgtctctactaaaaatacaaaattagccaggcgtggtggcacatgcctgtaatcccagctactcgggaggctaaggcaggagaatcgcttgaacctgggatgttcaatgcactccaccaggtgagagaaaagaattttaatatatacaactggaaaatgactacatatccagaacatataaagaactccatagaaaaagatagatcatccaatattttttttaaaatgggcaaaaatgaacttgaccacacattttgctttaaactatgacaatacaagtatttgcacgagtgaggtaatgagaacttccatacacacatttcatatacatacaattataaattggcacagatactatggaaagtaatttggcatcatctgtgaagttgtagatatatgtggtagattgaataaatacagccacaatattttggagctcctccaattaagaggtaaagtctatttttcacctttggaatctggggtagcttttttacttccttcaaccaagaaatgtagcagcaatggaagcagtcctatacttcgcttcaagacactttgctgagtctgcctttgtgctctgtgagctaccatgtgaagaagaccaaactagccccatggagaggcctcatggaagagagcagcccttgctggccagccaactgactacaaacag[223 bp omitted]gaggcgggagaatcgcttgaacccgggaggcggaggttgcagtgagccgagattgcaccattacgctccagcctgggtgacaaaagcaaagatctgtctcaaaaaaaaaaaaaaaaaagaagaagaagagcagtgagcagcgccgtccctgctgggctcagcccccagccaaccctccagctaaatgcagccatgtcagtgaacccatacaagcccagcagaagagctttccagccaacccgcagaatcatgagataaatcattgttgttttaatccatttacttccagagtgatttgttacccaagaatagacaactatgccccaacaatctaactcatatcccagaaaaatgtgcacatatgtagtacatcaggaacatgcataagaatgtttgcagcaacattgttttaatagcataaaactggaaagactccaaatgttatcaatagttgaatggatttttaaaaactgtggtatattcatatactgaaaca[134 bp omitted]cctgtctctgctaaaaatacaaaaaattagccaggcatggtcgtgggcacctgtaatcccagctacttgggaggctgaggcaagagaatggtgtgaacccaggaggcagaggttgcagtgagccgagatcacaccactgcactccagcctgggcaacagagcgagagtctgtctcaaaaaaaaaaagaaaaagaaagagcacagattaaagttatacacaatatggataaatattgcaaacatgttggatgagaaaaagaaagcacaaaagtaagcaaagagaatgtatatatgagggaacaaataactaaacatattgctttatataagtggacaaattatattgcttagctatgcatacatagatgatagaatataaagaaaaacattaatcactatccttagttctttgttttttttttttcttttttttttttttgagagagagtctcactctgttgcccaggtggaatgcagtggcacaatctcagctcactgcagcctccacctcccaggttcaagcaattctcctgctttggcctcctgagtagctgggactacaggtgtgtgccaccacgcccggctaatttttgtatttgttagtagagatggggtttcaccatattggccaggctggtctcaaactcctgacctcgtgatccatctgcctcagcctcccaaagtgctgggattataggcatgagccaccgcacccggcttgtttttctttacatttgatcatctatgtatgcgtatctactaagcaatatagtaaccactatcctgacttttatgatggttacctctgggaggcagtaaagagattatgattagaaaaagatacacagagagcatctagggttattctagttcttaatacaggtgatgtttacttcacggttcgttacacagtgcattgttttatacactttttttttttttttgttagaggaagggtctcgcccagctgatttcaaactcctgggttcaagcaatcctcccacctcagcctccctaagagctggcattacaggcgtgagccactgctcccggccttgttttatgcatttttccatatgtaggtaatagctcataataaaaggtttttttgaaaatacacaaaaaaactaccattacactcccaccagactggaaacaatttaaaagtccaaccaagtttaatcaagtgttgtgcaaaaagtagaacaaatggaagtctcacacatccctgatgggagggcaatgcattacgccactttgaaaaccagacaatatatgataaaattgaaggggagcacaccctactcagcaattcctttcctaactatatgctgtcaagaactcttgcacacgcacacatgtatattcccaggcatcttctagaagaaaatggtggttatttgtgagggttagggttactaggagaggtcgggcgcggtggctcacgcctgtaatcccagctctttgggaggcagaggcaggaggatggcttgagcccaggagttcaagacctgcctgagcaatatagtgggaccctgttctcaaaaatttaaattaaaaaaaaaaaatctgctgggagagagaggaagaggaggaggaagcaaaaaaaaagaaaaagaaaaaaaagaaaaagaaaaaaaaaagattactgggagaaattcaactcagggttgcctcctctggaaggccccatctgactagtccagacagaattaatggctctgtctcctgtcctcacccatcacttcagttaccagttagcacaagtttttggctgtctcattctcctttccttccccctccaaaattgaaaacttaatgaaacaaggactgtggtctgattcacctgtccaagtctctgttgtatagaaagaacacttcctaaatgtctgtctgatggatgtttttggaattaatgcctaaaaataagaaaaataagaaacaggggtgatcagacaatcaaggttctagtacagagaatccttttggagtttctgctagattgacagaaatccccaattcaggagttaacagttaagaatgggggccttagggcgcggtggctcacgcctgtaatcgcagcactttgggaggctgaggcgggcggattatgaggtcgggagatcgagaccatcctggctaacatggtgaaaccctgtctttactaaaaatacaaaaaaattagccgggcctggtgatgggcacctgtagtcccagctactcaggaggctgaggcaggagaatggcttgaacccaggaggcagagcttgcagtgagccaagttcgcgccactgcactccagcctgggtgaaagagcgagactccatctcaaaaaataaaaataaaataaaataatgggggccttctacttctccatttttccaaggatggccttggaagtctctgtgtggtatggtcttggatggtattttgttgtgtatctgggattagagaagccttcaatgtttgcaatttttagtacatccctgttagcatatccactctgaggtggatagctggcaatctctgagtttgaagatttatttctagggtgacaaaaggctctgagaaggataatatatgataggagattctattgtctccatttttagctatggggaaggtagagggcttgcaagtgcacccaaggttgaaatgtgtgaacatgggtctttgcagcacctttaaggttagggtctcagggttttaaagttccctggagctgagacccttaacaaaggggccggccttacctctcacagcagcgatgtgtgatgactgtcgcccagaagcccaggacacagaagttgaaagatgtgaaaaccaacaaagtgagcaggtttatcacagacacgagaaaggcatcactgagacagttgttggactggggcatgtaggaggctaaggaggcaacggagccaaggcctatgcctgtgttagacaaaacttgaccccctgctagagaccacacactcatattgtacacatccgatatctaaaagagagaagacaagcataagggggttgtaaaagaagaagcagaggacaactataatagaaatgttgcagggaggagagagggagatacaaaagtaaagaatggggaaaggaagctctaagaataggcagctgtggtgccctacaaggcctgacgggggagtgaggagatagatttcaccttggcaaccaccaactgttgaaggccaaattttgccccttccaggagtagagtccggatgaagaaaccgacaatgatgaaacaggggagcagtaccaagacatagattacctgaatcgagagtgggacatatcagcaaccgtgtaccagtaggggtcaaccaacagttaggagggatcaaaagttctgagtcagaaatgagtaggagttagaagaaagccttcagcaagagtcaggggctaggggagtaaaagccaaaggagtaagagattaggagatcaacaagtaacaaattgaggtaagggctaaagcatctgagaatttcaaggaatccaatactggtggctcaccttcccagtggacttgagcccattgatcatgaaagcaccaacaagacaccagcaaagaaagaagggcaggaccagactgtagactggtgacccgccatcctcgattctgtctgaggccttcaaggcctgctggtaccagaagtatatggagggtgttgtccgttcacattcaggatctggggggacctggctttagacatgcctgctagacaaggtaccccctcttcttccttatcccctcccccacctcccttttctctttccctctcccatttctttttccttcttcttcctcttccttgtccctccccactctctcctattccaaattcccttctacttctacttctccatttttcccttctcctcttctttcacttcctcctcaccaaagccactagagttcatcgttaagggacatttctcccatggaacgggaaactggaaggactggctcatgtagaagatgatccaggaattgaccacattgaagtacaggccgaggatgaagcacacctgggggccaaggaggatatggctggggaggaagagcagggacaggaaaagggaggggatttgacagaggattggggaaccaaagggatctgacccatggaggtattcacagggcgcatttcaggaggagggttgggatggcggtggggtgtaaaagtcaggcctgggcagccatgggctcctcaccatgaagctagaataccccacaccaccaatccagggggcaatgatcttccatacacccatgccaccctgacgcatgctctgaccagctgccatctccaggaagagaagaggaaccccgaccaggaacagcatgaagatgtagatggcagcgaaactgcctgtgaagaagattcagaagggactctgagaaccatgtggcctttcagtgcctggactccaggagcccaggaaaacattctccctaccagcgacctcttccagggccacaggcatcagggctcacccatgtctacatccctcacggtcccaagtgtccagtcctctggcccccaaatcctggaagacccaagtacctagtttccagcccatcttgggcccaggcctccagctttgccatccccatgttcagataccctgaacctctcatgatcctaagtgtccagggacctggctcctatcctgctcagagcaccaggtctttagtctctacatatctcagaaacattcatggttaaagcctggacaggactctgtcctgattgccccttgtggacccaggtttcctggtccccagacttacagcctccactgttaagccacaggtaggcaaagcgccagagacaagatggcttcatagagaagcccacctgagccagaatatactcagttttgctggaccagaacggacgggcaaggaggacctcactctctttcttctctgtcatctgcaccttctcatgcgtgggtttctggttcagggctgaggcagttaacgcctccaatacagaaatttgcttgggctgactggtcctggcctgagcctctgcaacccgggctgctgaaacttgggcctctgaggtccaagatgttgcagaccgggtcaatgaacccttgtcttcccacgtttgacttcctgggacactgtcagaaatcactgtgccagtccatgaggtgtttgccagcaaggatgtcgaaggctgggcctctgtcttcatctcacacagactctctggggcagctcccgcttctgcaagggagggttcatcttcctgaggagacctgaaggacaccaaaatctgtagattttagattttagagtcaagtaactactgagttacaaaacaatcctcaacatctccttaaagcaaattttataccaccactgacatttaaagcacaaaaaaatctcttgcataagtttcacttcttagaaatgttttcacgtggtggctcacgctgtaatcccagcactttgggaggccg[134 bp omitted]gaggcaggagaatcgcttgaacccaggaggcgtaggttgcagtgagccgagatcaggccactgcactccagcttgggagacagagtaaggctccatctcaaaaaaaaaagaaaaaaaaaaaagaaatgttttcttgtacaggatagggatagagacagacatacccaagagtcaggaatccctgaaatcaaaggatttcttttttttttttccagctactgggttcaagcgattctcctgactcagcctcccaagtagctgggattacaggcgcccactaccacacctgactaatttttgtatttttagtagagccaggttggtcttgaactcctgacctcaagtgatccgcccacctcagcctcccaaagtgctggaattacaggtgtgagccactgcacccagcctgaaataaaaggatttctaagaacactgaagtactatttacagagggcttctgaatttaaaaacaaaactaaactaaactaaactaatttaatactaaatctgccttgtaaccttagaaaagttactttacctttctgagctttctaatctgtaaaacactcagatctctgctcaaatatagcctcaccagagatgccttccctgtccacctatctaaaatagcagctacctacccacaactctctttacttcatggcatttctcatctcctgactttattatctattgattgttaatttattcattgtccatctctgcctactgctctatctccagcaaaaggatggtgttctacctcacatctagggctattctcctccttattctccaagttcccgccactctgaacttctgttggctcttcaaatacaagagaaaaggcaaggagtgtgctgaaaaaaaaaaagttacatgaaagagaggaagagagaggggaaactggagttttctttcagtgggggaaggagcatgctttccaaaagcagaggcagtagatgggcttcaaggcagcactggcacatttgggtgacatggataactgcttgtgagacacagcttccaaagagctctttgttacacaagaaaatgcttataattcaattacaggttaaaaacataagactaagatacaaatttctatctttagttctatctctactacatttaaaaatgcaatgaaaggctgaaaggaaatacatcaatatacagaagatgatcaggccaggcgcagtggctcacgcctgtaatctgagctactcaggaggctgaggcaggaggatcgtttgaacacaggaggcggaggttgcaatgagccgagatcgcacgactgcactccagcctgggcaaccctgtctcaaaaaaaaaaaaaaaaaaaaaaagacgatgatggctacaaatatgtttatatccttatccctgcttttacattaaattttttaaaatcttgtattacttttttttcagacacaggttctcactctgtcacccaggctggaatgcagtggcatgatccacagttcactgcagccttgaactcctgggttcaaaggatcctctcaccttatcctccaaagtacctaggactataggcatgtgccaccatactcagctaatttttaaaagtttttttcaagatgggagtctcactatgatgctcaggctggcctcgaactcctgtgctcaagtgagtctccggtctcagcctccagagtaggtggcattacaggcacaagccaccattccccactcacctgtattactttaataatcaataaaaatacggccaggcatggtgattcatgcctgtaatcccagtactttgggaggccaaggcaggcggatcacttgaggtcaggagtttgagaccagcctggccaacatggcaaaaccctatctctactaaaaatgcaaaaaaaaaaaaaaaaaaaaaatagccggacatggtggcaggcacctgtaatcctagttactagggaggctgacttaggagaatcacttgaatcgggaggcagaggttacagtaagccaagatcataccactgtactccagcctaggtgacagagtaagactctgtctcaaaaaaataataataatcagccgggcacagtggc[131 bp omitted]gtggcgggcgcctgtagtcccagctactcaggaggctgaagcaggagaatggcgtgaacctgggaagcggagtttgcagtgagctgagatcacgccactacactccagcctgggcaacagagtgagactccgtctcaaaaaaaaaaaaatcataatcataatcataatcataatcaagaaaaaatatgtattgataagtgaaaataaaaagatcataatggacaaagaaatccaattgaagaagctctcatcagcgaaatctggacaaatcagaacatcaaaataaagaatagtaacagatgagaaccaacagactaaaacaagaatccatgaatccacagggatacaactcaggaaaaggaaaacctcttccttatagtagaatacaaactaataaatgtacaaggaacgatgaattagaaggtcactgcttatcataaactaatcaagttgtacacatgaaatatgtacagttttttacttgtcaatcatccctcaataaatatgtctttttaacaaatcattgtttggaaattaccagagtaataactgacacaagcaagaatcatcaatggttgctaaaacaagatgatgaaaatttgatggggacaggataattgcatagtattactgtatctccccacaagatattccccccaaaaaaacccaagaaactagtatctttagagtattacacactacctaaaccaataatagtcacctgatatcatataactcctgatacaatgcattaagagcacaacatcatttctgtgggattcctgccaaaaacatgtaacaaaactccaatcgtgaggaaacaccagaaaacaaatctaaattgaagtacattctgtaaaatagctggcctgtgctcagtaaaaatgtcacagtcaataaagacaaggaaagatggaagtgttgtaagtctgaaattatgtcaaaattttgttaaattttttaaacttccaagcacctgccactcctacaattcaccatcaaaacaaaaggaagtttcttctaagatagccacatgaacaccaatctccaaacttacccacaatctccccctacccaacaaaaaaaaaaaccaatgattttaaaatattacaaatatggggatatctgcatcatttctgaaaaataggttccatcctcatgtcaaaaacagagaaacttctgctacataaacaagaaacaggaccaaactgtaatcactgaggagtcagttcacatctctttttcctgatgaagtggttcagtgtttcaggaagtaagtaaatactttcccagcaacttgtgggaaataaaaacaatcacttgccaaagaccttctgctccagtgaaccaacagcttccagaagctgtatgccagagaatgcaacagcaggtgggccactcctctgttattggatttattggagttattggtgggttgatgggcgtctccctgagacaaatgatgcttccataacattaagagagaagcagaaaatcatgcagggaagaaaaggctgaagaaaaaattaggtacaaaaatccagcctttggggctggtcatggtggctcatgcctgtaatcccagccctttgggaggctgaggcaggagatgttttatgtaagcttcgtggtaactacaaagcaaaaaactcagtagagatgattcaaagcataccactagagaaaatcaatataattagtcacattgatataataaagaagaaaaatattatcatctcaagagatataggaaaaacatacaatacaatgatgatttacggagaaaaacttttagcaaaccaggaataatttccctaacctgataaatggtgtctctcaaaaaaaaaagattatacttaatagtgaacatatgcttaaacataggcacatatttaataatgaagtgaagaaagcttgccttttgaaatcaagaacaatcaatgaaaccagctatcagcacttccttcccattgcattaaatattttagacaacacaggaaagcaaggggaataaaagacaaagattaaacaaaactcactattcacagatgatatatctatgtggaagatccagaatactacagataaattatttaaattaataagataatttagcaagattgttggatgcaaacagcaataaatgaaaattatttatatgtctatgcttgcaatacataattagaaaataaaattttaaaataataatgccacttataaaataattttttaaatatagagtaaaatcctgggaaggtaatggcaataacagcaacattgttttaaaatcttcccaaatactcacatgaaaacaagtagttctactagattgcaagcccaaaatccatggataatatttacaatatcaagataaaccccaaaagacaagtctatgagaacaaaccacaagagccacagacctgtatagaatcagcatctgtgtgggaggaaacaaaggaagcaagagagcatctgacagacctggggatgggggacagggaaaccagtctctcaaaataatcaacaggtactcaccagaaatcatgggaaggctattagagaacagcagctaaaactagaagatgtcttgcctaatccaataacagttgagtgcatggagtcaacaatagaaactgaagggaccagggcagactagattctatgaactcttaaaattaaccaaccagggatcttttccaacccagaggccacaatgaggagaaattcctgtgagtaaagccaaattgagcaatacaagaacaagaatgatgaaggataggccagacacagtggctcatgcctgtaatcctagtactttgggaggccaaggcaggaggatcacttgaggccaggaattcaagataagccttgacaatgcagtgaaaacccatctctaccaaaaaaaaaaaaaaaaaattaaaattaaaattagccaggcatagtgggacacgccagtggtcccagctatttgggaggctaagtggagaggatcgcttgagcccaggagttcaaggttgcagtgggctatgatcacaccactgaactccagcctgagcaacagagtgggacctcattctctaaaaaaataaaataaaataggccaggtgcagtggttcatgcccgtaatcccagcactttgagaagccaaggcaggaggatcacttgaagtcaggagtttaagacaagcctggccaatatggtgaaaccccatctctaccaaaaaatacaaaaattagccaggcatggtgggacacacctgtagccccagctactcggaaggctgaggtgagataattacttgaatccaggagggggaggttgcagtgagccaagattgcaccactgcactccagcttgggcaacagagtaagaccctatctcaaaaataataacaataataataaaataaaattaattaattaaaagataattttaagaaaacatagaaatgaaggatatacaggatccagataaaaatggggagaagaaatttccacttttgaccatgaaagcaaaacagtgtctggagttacctccacaaaaacactacaaaactgtacaaataggccaggcgccgtggctcacgcctgtaatcctagcactttaggaggccgaggcgggcggaccacgaggtcaggagatcaagaccatcctggctaacatggtgaaaccccatctctactaaaaatacaaaaaattagccgggcatggtggcgggcgcctgtagtcccagctactcgggaggctgtggcaggagaatggcgtgaacccaggaggtggggcttgcagtgagcagagatcgcaccactgcactccagccagggcaacacagcgagactccgtctcaaaaaaaaaaaactgtacaaataattaaaacaactattttcacatattaaacaaaggcagtacagcattgcaatctctaaaaaaaggccagaaaacaaggtaactaattgcacgattgccccatttttctgctaatttccaaactttggcacaggaggaagaatacaaacagagcctggcagtctcagcacttgaggaggcaaaagtcagttcaggaaggcttaggtgactagaattagctgggctaagtactcaacagaagggagccacagagaaagagctctaggaatctggataaagtaccttcgagccattagctaaatatcaacctgcacatgtatagtatgaaacctcataagaacaggcaaagaataaattccaaggaaagaaaagtactggggaactacaggtaaaacaattcctagaacttggagaagaacaagaattactcaagtttccatcagccagtgtggagagactttactgaatacttggaacatttaaagtggcataaactagctctagttctagtagtaggactactttagacctgaaaaaaaaaaattcttaaaagcaacccttaaacagccaaaactgatcttcaagtaacttaactgcctgtcacaacaaaggccaacattccttaagataatacagacaaacctagcactgaacaacaaaaaattcataatgtcaaccatctagtcaaaaattactagacatgcaaaaaagcaggaaaagtgacccataatcagacaacaaaaacagaaatgatagactaatggaattaacacaccataacactaaaatagctgttacaaatatgcttaatatggtcaaggacttaaaaggaaaacatgaacagaatgaggaatataagatagctagatagctagctagctagacagacagatagatattttctcttttgagacagagtctcactctgttgcccacactgatctcagctcactgcagcctctgcctccaagtttcaagcaattctccttcctcagcctcccaagtagctggaattacaggtgtgcaccaccacaactggctattttttttttttttttttttttttagtagagacagggttttgccatgttggccaggctggtctcgaactcctgatctcatgtgatccagctaccatggcctcccaaagtgctgggattacaggcatgagcctccatgcctagccatgatatattttaaacatcaaatagaacttctagagatgatacaacacctgaaatgaaaatttcactgaagattactggcagattttaataaatcagtgaacttaaagatatagcaatagaaacaatccaaaatgaagcacaaagaaaaaaaaaagactgaaaacaattaccagagcattagtgactgtgagacaatatcaaatggcctaaaatgtgtaactggaggtccaaaataaagggaggatgggaaaatgaaaccaggccaattttccaacaagccagatgcccatagaactgaagcttgagaaacttacatttgtacaatgagatgaacctgctgtatgttgaccaagtactcttctttactcctccctaattccttcatatatgtgtgtgtgtatatatatatatttgtatatacatataaatacatatacatatacatatgtgtatatgtgtatatgtatatacatatacttatacatatatgtgtatatgtgtatatgtatatacatatacctatacgatatatacatatacatatatatatcaagaaaagactcacataattgaaaggataaaaggacagttctacaataataactggagactttaataccccactacgaacaatggacagaagcagcagacagaagataagcaaggaaatagaggacttaacacaataaaccaaccagatctaacagatgtattcagaacactctagccaacagcagcagaatacacattcttctcaagtgcacatgggacattttccaggagagaccacaaatttgtaggccacaaatttcctttttttctcaatagaattagaatgataaatatcatacaaaatatcttctccagccacaataggatgaagttagaaatgaatcacaaaagtaaaattgaaaattttacaaatttgtagaaattaaacaacacactcttaaacaaccaatggatcaaagaataaactacaaggggagttagaaaatacttacagataaatgaaaacgaaaacacacatactaaaatttatgggaggcaacaaaagcaatgccaagggggaaa[136 bp omitted]catagtgaaaccccatctctattaaaatacaaaaattagctaggcatggtggtgggcgcctgtaatcccagctactcaggaggctgaggcaggagaatcgcttgaacctaggaggcggaggttgcagtgagccgagatcacaccactgcactccagcctgggcaacagagcaagactccctctaaaaacaaacaaacaaacaaacaaaaaaaaaccagatcttgaatcaataacctaactctaaaacttaagaaactagaaaagcaaactaaacccaaagctagcagaagaaaataataaaaattaaagcagaaatgaatagagaatagaaaaacaatagagaagccaaaagttgtttctttaaaaatatcaacaaaattgacaaacctttaactagatgtactaagaaaaaaagagaagactcaaatgattaaaaccagaaatgaaaatggggacattattaccaattctacagaaatagaaggattataagagagtactatgaacttatgaacaactgtacaccaataaactggataacctagattaaatggacaaattcctagaaatacaaatctactaagactaaatcacaaacagaaaatctgaatagatctataactagtaaggagattgaattggtaatcaaaaatctctcaacaaagaaaagctctggacctgatggcttcatgggtgaattctactaaacctttaatgaattaatatcaatccttctcaaacttttccaaaaaattggagaggagggaacacttcctcattcatcctataaggccaacattgccctaataccagagccatacaaagacattataagaaaagaacactacagacctatattcattatgaactttgatgcaaaaatcctcaaaaaaaatactaccaaacctaattcagcagcatattaaaaggattatataccatgaccaagtgggatttattcctggaatgcaaggatggttctgcatacaaaaatcaatcaatataatataccacattaacaaaatgaaagaaaaataatgattctctcaactgatgcagaaaaaacatttgacaaaactcaataccctttcatgataaaaaaaaaaaaaaaaactcaacaatctaggagttaaaggaaaatacggctgggcatggtgactcatgcctgtaatcccaacactttgggaggcctgatgaccacttgaacccaggagttcaagaccagcctggggccaggtgcagtggctcacatctgtaatcccagcactttgggaggccaaggcgggtggatcacctgaggtcaggagttcaagaccagcctggctaacatggtgaaacctgatctctactaaaaatacaaaaattagtcagatgtggtggtgtgcacctgtagtcccagctacttgggaggctaaggctggagaatcgcttgaacctgggaggcagaggttgcagtgagccaagatcataccactgcactccagcctgggtgacagagcaagactccatctcaaaaacaaacaaacaaacaaacaaacaaaatttttaattacctgggtgtgttgatgtacttctgtagtcctagctactcatgaggctgagatgggagaatcacttcagcccaggaggtcaacgctacagtgagccatgatgacaccactacactccagcctgggtcacaaagtgacaccatgtctcagcaaaaaaaaaaaaaggaaaatatcccaacataatagccatatacgaaaaactcacagcaaatgtcatacttaatgataaaagactgtaagcttttcctctaagattagaaacaagcgtagaatgtctaattttgccacttttattcaacatagtactggaagtcctagccagagaaattaggcaaaaatataaataaataaaaggaaaccaaactagaaagattatatgatcttatacgtagaaaatcctaaaattttcaccaaaaaaatttttgagctaataaatgaattcagcaaagtagcaggatacaaagtcaacaatcaaaactcagttgcatttttatacactaacaatgaacaatctgaaaagaaaattatgaaaacaattccatttgtaatagcatcagaaagaataaaatacttaagaattaacttggctgggcacggtggctcaagcctgtaatcccagcactttgggaggccaaagtgggcagatcacctgaggtcaggagttcgagaccagcctgacgaacatggagaaaacccgtttccattaccaagttacccaggcatggtggcacatgcctgtaatcccagctactcaggaggctgaggcaggagaatcacttgaacctgggaggcagaggttgcagtgagccgagattgcaccattgcactccaacctgggcaacaagagtgaaactccatctcaaaaaaaaaaaaaaaaagaattaaccaagaaggtgaaagacatgtacaaagaaaactacaaaacattgctgaaaaaaattaaaggagacataaataaatggaaaaatatcccatgttcatgggttggaagacaacactgttaagatgtcagtattacccaaagcaatctacagaattagtagctttttttttttttttttttttttttttttttttttttttttttttgcagaaatagaaaaacacgtcctaaaactaacatgaaatctcaagggaccctgaacagccaaaataatcttgaaaaagaagaaaaacgctggtgtactcacatttcctgatttcaaaacatattacaaagctatagtaatcaaaatagtgtgttactcacataaagatacagaccaagggaacagaatagagggcccagaaacaatgtatggaaaaatgattttttacaagggtgccaagactactcaatgagtaaaggacagtcttttcaacaaatggtgctgggaaaactggattatgtacaggcaaaagagtaaagatggactcttacctaacaccacatacaaatacacaaaataaatcaaagacctaaatgtaacacttaaaattataaaattcttagaataaaacatacgacaaaagcttcatgatagtggatctgcaatgaattcttggatatgataccaaaggcaaaagcaacaaaagaagaaacaaacaggatttcattaaaatgttttaaatttgtgcatcaagagacactatcaaaggggtgaaaagataacccacagaatgggaggaaatatctgaaaatcatatgtataataagagattaatattcagaatatatagagaactcgtaaaactcaacaacaaagaaacaaacaacacaattcaaaaatgggcaaaagacttaaatagacatttctccaaggaagatataccaatctccaagaagtacatgaaaagatgttcaacgtcactaatcattaaggaaatgcaaatgaaaactacaatgagataatacctcgcatccattaggatggctaatataaaaaggcagaaaataagaagtgttggtgaggatgtggagaaattggaatccttgtgccttgctggtcagaatgtaaaatggtgcaaccaccatggaaaacactatggtggttcctcaaaaacttaaaaatagaattaccatatgatccagcaattccacttctgggtatacacccaaaataagtgaaaaccaagcctccagtggctcagcctgtaatcccagctctttgaaaggctgaggtggaaggattgcttgagcccagaagttcgaggctgtagtgagaggtgatcatgccactggactccagcctgggagacagagagagaccctgtctcttaaaaataataataataggctgggcacgggggttcacacctgtaatctcagcactttaggaagctgaggcgggtggatcggctgaggtcaggagctcgagaccagccaggccaacacagtgaaaccccgtttctactaaaaatacaaaaaattagctgggggtggtggcgcacgcctatagtcccagctacttgggaggctgaggcaggagaatcgcttgaacctgggaagcagaggttgcagtgagctgagatcgtgccactgcactccagcctgggtgacagagtgggactccatctcaaataaataaataaataaaaaataatagattcatgtttcttaaacacattctagaacagttgtccttaaaagcaagctttacggaagggagagaactgagttttggccagctggccacttccaacatccataaagccccttgagccccaggcggactcctcttcccatatgggtgcaaccctccatggtgcccctacaccgtcatcccaagcaactcctaggctcatgccctgtggggagtgctcaggatcccccagaaatgcccattcccctcacattacctccttccctggaactataacctccagaaaaggaaaataaggagctggtgtcccatttctgcaaaaagcagaaaataactgccctaacagaccagtgatggggctagacccgggtttctgccactcgggcacttgacactgatggctttccccaaaggcagggactgatggccgaatcctgtcaaggaattggctcaaactcggactggatgagtgaggagagccgaagacagtttcctctgtcctacgtggggggtaaaggagggacccctttgatccctcagctccacagagcccagggcaaccaggaggctcccagccagtcacctgtcacccgtcagtggagcccagtgggcccgggcctcgaaaatggcgcccagccccacacaccccagatgtgggaacattttagggctccctgggccgtgaccctcaccctagccccaaggcttctgccaggttcttcagtccagccagtcggacaaaaatgagggtgaagaagccccagctgagaagcctagcaatctcctcaggccccttcaggcgtcgacagatcggtttgggcgacacccctcgatctgcctggcgcgcggcctttcccgccgattctctgcgcatgcgccgccgcgccccctcactctttccctacagctgtagcaaacactgtaaccacttcgccctccccaactccctgctctctccccacacgcacgcacgtgtgcacatcctctgactgctcacgcgccactcccttccccaccgcaccccaccccgacacccacgatgccacgcttcaggcggggctctaagacaaggcctttctctggcacatgcactttgcttccacttcatgtaaggaagaagagggtaggaagtgggagaatcgtctcattcattccttctagccttcaaacctttcgcatttacttaaagatcgcctactagaaaccaaaccttaaatatgcgtccaacaaggcagacagggacgttgccttaagagagctcagaagcctactagggctgcagacaagaattaaaaactcaaagatttacttaggtcatccgttctcatactttccggtctcttaagaattattaaggactccaataatttatgagttacatttatatgggttgtatgtttatgtgagttgtatctatcaatattaaaataaatttctaaaatagtcattgtttaaaaattcattatgtgtcaaaataacatttttatttaaaataactataatttctactccaaaagaaattttggcgctgggcgcggtggctgacgcctgtaatcccagcactttgggaggccaaggcgggtggatcacgaggtcaggagttcgagactagcttggccaacatgatgaaaccccgtctctactaaaagtcaaaaaaaaaaaaaattagccgggcgtggtggcacacacctgtaatcccagctactcgggagcctgaggcaggagaatcgttggaacccaggaggcagaggttgcaatgagccgagattttgccactgcactccagcctagacaacagagcaagactccgtctcaaaaaaaaaaaggaaaaaaaagaaaaaatttggggagaagaatggcatcattttacatttttgcaaatctctctaatgtctggcttcatagaagacagctggattctcatatctgcttctgcactgagtgtgtcaaaatagctcatgtcttgtagcttctggcaaacatcactatattcaaagaggaaatgaaagtgaaaggcaaataatatcttagtagtattatgaaaataatgttcacctcatggacccccaaaagtgtttcaagagcccccaggagtccctgagccacactttgagaatgaaaggcttaaattgttatgattgaacaaagagatgaagaggaaattttgggggtgctgtaagaattcatcacaatctttgggaatcattcaatctttcaacacgtatttatcgagagtctactaaatgctaggaactgggaatagtgtagagaacaaaacagaccccattcctgccctcgttttgcttcacacaacaagaaaacagatatatgatgaatctca[138 bp omitted]atggtgaaaccccatctctactaaaaatacaaaaacgagccaggtgtggtggtgcacgcctgtaatcccagctactcgggtggctgaggcacaagaatcacttaaaaccatgaggcagaagttgcagtaagccaagatcacactactacactccagcctgggtgatggggtaagaccctgtctcaaggaaaaaaaaaaaagtgctgcgacagaaaagggccacagacctatttatttctatcgaattttttttttttttgagacaatctcactttgtcacccaggctgaagtgcagtggcataatctcggctcactgcaacctctgcctcccgggttcaagcaattctccctgcctcagccttccgagtagctggggttgcaggtgcctgccattacgcctggttaattttcatatttttagtagagtcagggtttagtagagtcagcctgccatg[136 bp omitted]aacactggagttgaggcttaaaggattatttgctaggtgaaaaatgtgtgtgaacatctcaagccttgaggctgtgcaaaggccctgaggcagggcaaactgtgtgttcaaggcaccaggaaaagtctcagtcggtcaataaatatttattgaatgatgtgccccacactgtcctagacccctgggatatagttatgaaaaagattttacgttccagttgcacaaagaaagtaaatgcctaaatagaaagaatttcagagagtaagagtgctgatagggagttactttagacagggtagtcaagaaggactcttggggaaagtgatatttcagcagagagctgaaggaagggagccttgtgaacagcatagggaagaacattccaggcaaagaaaatggcaacagcaaaagccttgaggcaagaagtacacttgatgggttctggaaatggcaaagagtctgatatgaatggatcccagtgattgaggaaagggtagcaacagatcagatcagagcagtggcaggggccagagtattatttggaggcccttataggtcatggtcggaatttttttcttttttttctgggtgagatgaaagctatttgagggttctgagtcaaggagtgactttcattttaatggcaggctccccctggcttctgggcagagaatagcatgtatgggtgtattcctctgttttcacactgctgtaaagaactgctcaagactgggtaatttacgaagaaaagaggtttaattgactcacagttcagcttggctggggaggcctcaggaaacttacaatcatggcagaaggcaaaggggaaaaaaggcaccttcttcacaagcaaaggagggaagagccccttataaaaccatcagatctcatgagaactcactcactatcacaaaaacagcctggggaaaccacccccatgattcagttacctccacctggtctctcctttgacacatggggattatgaagattataattcaagatgagattttgggtggggacacagccaaatcatagcaatgggctaaagatagaagcagagagcccagtgaggaggaaatctctagtccaggcaagtgatggtgttgattagatctgggtaatagcaatggagatggtgaaaagtggtcaaattctggatctatttcaagaatagagccgacatgatgtgttgatggattgtgtggtggttttaaaatacgtctgcaaattcttcaacactttgaaagataaagtctatttccccaatctttgagtgcaggctctccttagcaactggcttccaatgaacataagtaatggtggggaacttcaggactaggtcataaaaagcattgctgtttcttacttgcccattcccttcaactgatttctgtaaaggaagccagtcaccatacggtgaggacactcaagcaatctgtgaagagatccatataagagaagagctgaaatttcctgccagcaaccagcaccaggtgagtgaaccatggtgaagtggatcctccagccgtagttaaatctccagatgactacagccccagccaacatcttgactgcaacctcataaaacactgtgagcagaaatcatccaactaagctgctcccagattcctgacccacaaaaactacagtaggtaagaaatgtttattgtgttttttttttgagatagagtcctgctctgttgcccaggctgcagtgcagtggtgcgatctcagctcaccacaacctccgcctcccaggttcaagcaattctcctg[132 bp omitted]cagcctcccaaagtgctgggattacagtgagccaccgctcctggcctaagaaatgtttattgttttaaactgctaaatttggggtaatttgttacagagcattagaaaactaatggtgattaggtttggggtctgagagaaagagaggaatcaagaatgactcagccgggagcggtggcttgcacctgtagtcccagcactttgcaagggcgaggtgggaggattgcttgaggct[170 bp omitted]ctgcctcagcctcccgaatagctgggactacaggcgcccgccactacgcctggctaattttttgtatttttagtagagacgggg[147 bp omitted]ccaggtgtggtggcacgcatctgttgtcccagctactcaggaggctgagtgggaagatcacttgagcccaggagattgaggctgcaatgagtcatgatcgtgccagtgccctcccacttgtgtgacagagcaagacctcaaaaaaaaaaaaaagactccaaaactttgggcctgaagaattggaagatggagtgacaatttactgaaaaggaaagtactggagtgtgcaggaggtgggagggaatcaatagtttcgttttgggcgtgttaagtttgagatgtcaattatacagccaaaggcagaggttaagttgtccttcactgcaaggagacctgggaaatgaatcttcctgagtccgcagttcaggggaaagtttgaggctaggcatataaattggtaagtcaacagtattgtagattgcgatgaacactatggcactgcatgatatcatctcgtgagtgagtgtagctagaaagggctaggactccccaaattttagaagctagaaaaaggacgatccaatgaagattgaggagaaccagccagtgaagaaggaaggaggaaaagcaagagggaatttgccagtaaaggaggaggggatcaggtgaattcaatgggtagaattgctgttctcaaacgttagtgcacatcagtcaccaggaaggcttgttaaaacacagactgccaggccaggtgcagtggcttgcctgtaatcccaggactttgggaggccaaggtgggcagatcacctgaggtcaggagttcaagaccagcctggccaacatggtgaaaccctgtctctactaaaaatacaaaaattagctgggcatgatggtgggtgtctgtaatcccagctactcaggaggctgaggcgggagaatcgcttgaacccgggaagcagaggttgcagtgagccgaggttgtgccattgcactccagcctgggcaatagagtgagacaaaaaaaaaacacaaaaaaaaaaacagattgccaggcccgcccccagagtttctgattgagcaggtatattcgcttcccgagactgctgtataaattactacaaacttggtggcttaaagcaacaaaaatatattatctcacagttctggatgccaaaagtccgaaattaaggtgtcagcacgccacttccttcaaaggctcagaggacaatccttccttgactcttcagtttctggtagctcctggtgttccacttttttttcccctgtagggtcttgctctgtcatccaggctggagtgcagtggtgcaatcacggctcactgcaacttcgatctcccaggctcaagcagtcctcccacctcagcctcctgagtagctgggactgtaggtacataccacaaagcccagctaatttttttgttaatttttgtagacagggtctcactatgttgcccaggctggtctcgaactcctgggctcatgtgatcctcctgcctcagcctcccaaagtgctggaattacaggcatgagccacctcacctggcccataataatgttttgatatatatagtgtatgcagtaacaggtattctatttgtagttgttaggatgtttaaggttagctgatttaacaaacaaccgtaaaatcttagtagcttaatacaacaggttgttacttacataaagtccaaaatgctttatgtaagtccaaggataattctcagcttcctgcagccagtgagtgaagggagaaagagtaaggattatggaggacatttcaggctgagtctagaaatgggctgtgtcccttctgcacccattccattggcccaagaccagtcacatggcctcaacttcactgcaaggagacctgggaaatgaagtcctcctgtgtgcctaggaaagaagaaaccaagttggtgagcatcaaagctgcagtgagccgtgattgcaccactgcactctgccacctacccttcgacttctggttaatcatgtactcatctctgaggagggatcagtgggtgggaaggagggattggtgtattagtctcctatggctgaaatagcaaattaccacagacttactacttagaacaacagaaatgtattctcacatggttctgtaggccagaagtccaaaatcaaggtgtcaccagggccacactccctccagaggctctgagagaaaatcagttctttgcatcttccatctcctggtggctccaggagttccttggcttgtggctgtagaactccaatttctgtgtctaccatcacatggtgctctcctcttctgtgtcttctcctctgtgtgtttcttagaaggacacttgtcagccgggtgcggtggctcacgcctgtaatcccagaactttgggaagctgaagtgggtggatcacgaggtcaggaattcaagaccagcctggccaagatggtgaaaccccatctctactaaaaatactaaaatcagctgggtgtgctggcaggcgcctgcctgtaatcacatttactcgggaggctgaggcagagaattgcttgaacctgggaggcggaggttgcagtgagccgagatcacaccacagcactccagcctgggtgacagagcgaggctctgtctcaaaaacaaaaacaaaaaacagacacttgtcatcagatttaggggtcacacagataatgcagtatcttgagatcctgaatgtaattatacccgcaaaacccttttttccaaataaggtcaccacaagttctggggattaggacatagacatatctttttggagaacgccatgcaacccactataatcagctataattatttttgtagaaaatgatgggaacctgacttaggatggtggccttggaaagaagtggctgggtttgcaatgtactttaatggtagagcagagaggcgttggtggtggttagaaacagaagctgaggggctgggcgcagtggcttacacctgtaatgtcagcactttgggaggccaaggcagttggatcacttgaggtcaggagttcaacaccagcctggccaacatggtgaaaccctgtctgtactaaaaatacaaaaattagtcaggtatggtggtgcatgcctgtaatcccagctactctggaggctgagacaggagaattgcttgaacgcaggaggcagaggttgcagtgagccataatcgtgccactgcactccagcctggtcaacagagtgagactccatctcaaaacaaacaaacaacaacaacaacaaaaacctgggtgtggtggctcatgcctgtaatcccagcacttggggaggccgaggtgagcggatcacttgaggtcaggagttcgaggtcagcctggccaacatggtgaaaccccgtctctaccaaaaatacaaaaattagccgggcgtagtgggtcatgcctgtaatcccagctacttgggagaatgaggcaggagaatcgcttgaacccaggaggcggaggttgcagtcagctgattgcaccactgtactccagcctgggcgaagagtgagactctgtctcaacaaccaccaaaaaaataaaagctgagggatgaggcaggtggtgactcagcgtttggatacagaactgtgtggctcaggactgggtttcaaaaagacccctctggggctatgtgggggacagactggagggagaaactagaagccagggagaagcctaaagtcagggtccaggtaggagagcaggagcccagagcctgcctgagccctcaggacagagaagaggggtggagtggagactcagcaggcaggagggatctggctaagagactgatgcgctgttggggaagaggggacaagatggagctttgacctcatgactagatagatggtggggctgcctcagatgaggaaaccaggtgagagaatttggggacatcagaggaaactgcagaggccactgggtgtgcacctgcaaccaggcactgcagacccagatctgactgtcaggatcccaggctcagtgcctcctcctctggggcctccgctcctcgggccccactgcagaggcaggaagtaccgcctgatgctcagcttccgctgggggtgttggcacggcccagcgccctccccactcccagggaccttcccacctcgagcctgtagcactttcacttccccaggtacccagcccctgcccccagcacctgggtgctccctggtccagaacaggctgcagactctgagaggcacaaaaacaagtggggaagggggagacagagaaaagaagacaggctgggcacagtggctcacgcccataatcccagcactttaggaggccaaggcaggaggatcacttgagcccagaaatttgagaccagcctaggcaacacagtgagactcccatctctacaaaaaatgaagaaaattagccaggcatggtggtgtgcacctgtagtcccagctacttgggaggctgaggtgcaaggattgctcgagcctgggaaggttggggctgcagtgagctatgatcgcactactgcattccagcctgggcgaccctgtctcaaaaacaaaaacaaaagagagatgaagagagaaaggaggaaggacccaaagaaggggccagaagcagagagaggccaggcacagtggctcacgcctgtaatcccaacactttgggaggccaaggcaggagggtcgcttgagtccaggagttccagaccagcctgggcaacctagtgagaccctatctctgtttttttttaattaaatataaaaaatacaacactcccactccatagcaagaccccatttctacaaaaaatacaaaaattagccaggcatggtagtgtgcacctgtaatcccagctactcagaaggcagaggtgggaggatagcttgagcccaggctacagtgagctgttttccccaccgtactccagcctgggtgaaaagtgagaccctgtctcaaaaagaaacaaatatataaataaaataaagaaacacagagagagggaggatagagaccccaggaggcaggaggacagagacccagaggagggagagactctgctgagataaggggacagagatggggagtagcaggaaggtggggacaaagacccagagaggaggaacaagagacccagggcaggaaatgggagacacagctggatgcagagatgggagagcttagcaggccatgaggtcagagtgtctgtgaggtcagctgctgtccagggtcagccctgaggtccccatgcccagaggtgggttccagtagatcaggggtccctttagatcccccagcgcctgagacatggagacctgggagggactgccccatgagtccttggtgcccacaaattccaaggcccctcaggtaccagagcatgtgtcccagtggagcaggtgagggagacagggacagagagagagacagaaagccaccttacatgaagcgggagtgggtggagccccacccctggaacttcctcttttggggttcttcctttctctctcagctctccgtctctctttctctctcagcctctttctttctccctgtctcccccactgtcagcacctcttctgtgtggtgagtggaccgcttaccccactaggtgaagatgtcagcccaggagagctgcctcagcctcatcaagtacttcctcttcgttttcaacctcttcttcttcgtgagttgcctcatggctacccagccggggcccagcccctgccgctaacccagccctcatcttcccctgtggcccacccccgtatccgcatctcctctccccaggtcctcggcagcctgatcttctgcttcggcatctggatcctcattgacaagaccagcttcgtgtcctttgtgggtgaggggggctggggcaggtgggagggcctcccccaacccaagcaacttcctggggtctcccttgtctcagggagacctacggtgccctactctgcaggcaggctacaggctcccatccactgctcaccggaggcttcttggagcctgagtcttcttccggcaaatggggttgtgcatacaaacaacaatgatcatgagagccatttctcaagcacttcctatctgtcgggacttgtggctggtcagatgcccccacaaaccttcccctcgcttgaggttcagagaggggaagccccttgatggatgtcatacagcaaggacgtaaaagagccaaaataacattaataataggaaaataataatgaagtatgaccctaaataataatgaaatataaccctaaacgctcatatttaagaagtctttgccctgtgttgaggactgggttgaacacatgtcctcatgtgtctctcaaaatgaccctaggggccgggcgcggtggctcacacctgtaattccagcactttgggaagccgaggcaggtggatcacttgaggtcaggagttcgagaatagcctggccaacatggtgaaaccctgtctctactcaaaaatacaaaacgttagccaggcatggtggcacatgcctgtagtcgcagctactagggaggctgaggcaggagaatcacttgaacctgggaggcagaggttgcagtgagccgagatcacatcactgcactccagcctgggggacagagcgaggctccaactcaaaaaaaaaccctaagaaatagatatcatctcctatgcctcagggaggtttaaggagccaagccaatgtcacagaacaagtgatagggctgaaactactggggacgaggaggagctgaaggaggaaggagagggtaagaggaagagagacagagatccagggacgggaaacaggcccagaaagaagagaaagtttcagaaggaaacagggactcagggtggggcagggacagagtcccagagagaggggcaccaagatactgctccccacttgggtggctgcctaggtgggaaatggggctgcctggagctgtgccacacagctcatcatcactcccctcacctctcccaggcttggccttcgtgcctctgcagatctggtccaaagtcctggccatctcaggaatcttcaccatgggcatcgccctcctgggttgtgtgggggccctcaaggagctccgctgcctcctgggcctggtgagtgcaccatccctctccgtccctaggaacactcctatccccaccctcaaaaatggcctgggccggggttgcaggggtggtcagcctgatctctccactctgctccccagtattttgggatgctgctgctcctgtttgccacacagatcaccctgggaatcctcatctccactcagcgggcccaggtgagcttcctgcagtggccaccacccacccccagcagggaggagagggaagggagtggtgggagagggtggagagagaccgaaacaagggcagacaggggctaacctagataaagagaaataagaggctgggcctggtggctcacgcctgtaatcccataatcccagcactttgggaggctgaggtgggagtccaggagtttgagaccagcctgggcaacatagtgagaccccatctatatttaaaaaaaaaatccgggtgtgatggtgtgcacctggggtcccagctacttgggaggtcgaggtgggaggatcacttgagccagggagtttgaggctacagtgagccatgcactcagcctgggtgacagagtgagaccctgtctcaaaaaataaattaatagaaagacacaccgacctggaccaagggagacaggcataaacagctccaaagggaaacacacgggaaaaagagagaacaagagaaagaaatagacgccctgaaagaagagacagagacttatgagccgtagaaatagtggaagaaacagaaagacagacctgaagtacacagagctagccattcagtaaggatttgagactggcccagagatgcacagggcccgcctgaggctggcacagcctgagagggggaggggtggggcggggaagataaggcccagcctcactggtggcctctcagctggagcgaagcttgcgggacgtcgtagagaaaaccatccaaaagtacggcaccaaccccgaggagaccgcggccgaggagagctgggactatgtgcagttccaggtaagcccccctcctccagttccctcccggactgacccgcctcagccctgtgcttggaggagactccaccccaacgtgggcccgacccccagctctacgatcctaacacaccccaatccctcccaggcccgacgctccccactccccagatgacacaactgtccccggcgtcgcctggtctcccagtacccagaccctggcgtggcttcgccatctacctcgagagactccgcccccgcccccgccccgaccagaggttgtcaggcccctagtcccaagaccctagcgagacacggcttcctaccccgtagtgactctggcttccaccggaccccgcccccgatgagactcacatggtctcgcactcctattcacctgtcgggtatcagaggctcaattgcaccacccacccaatctctagtccacagcgcgaccctgcagctccttccccagccccaggtcaccccgtgactcgtctttcccagccccatgttcccgtaatgtcccctggctccggccccatcgtgaccccagcccactgtcccccactccacacccaccacttagtcccctgctccccgacctgacctcatacccatcaccttgtcccctgatccccaacatcatatgtctccagtcccggtccctctgactcgtatccctctcccagctgcgctgctgcggctggcactacccgcaggactggttccaagtcctcatcctgagaggtaacgggtcggaggcgcaccgcgtgccctgctcctgctacaacttgtcggcgaccaacgactccacaatcctagataaggtgatcttgccccagctcagcaggcttggacacctggcgcggtccagacacagtgcagacatctgcgctgtccctgcagagagccacatctaccgcgaggtgggcaggggttcggagcataaacctgtcgaatggggcggggcctgcgggagggggagggctgtcagtgagtagcggcctgagaaagggcggggtctacgagaaaaggaaaggtacggcaggaggggcggggccctctgaagggggcggggtctgcaggaagggcagggcctaaagaaaaggctgggctggctctggaatacagatgtctagggaggggccaggcttggaaaaggtgaagcgagggtgcactagtaaggagactagagtgccctggtgactaggggagcgggtagatgcctgaagacggtgagggttggcctgaaaagaacgctgggcctgggcttgagagtcccagaaagaatccctttaacttttccctacaccccccagggctgcgcgcagggcctccagaagtggctgcacaacaaccttatttccatagtgggcatttgcctgggcgtcggcctactcgaggtgatctggccccgcccccacccgcgatcggccctaaatccctagatggccctgcccttcatttcgcgtccttcggttgcctgggaaggacgagctcagggcggagcgcagcccaccccggccctcccgccgctccacccagcaccggagggtgggggcggcccagcttcagggagccctgattgggtgtacgcagggaaagcctcctgctattggctgcgatctccctcccctttctccgcagatgactgtcatggtgctgagcgtacagctacagcgcagggcactccgccggaaatgcgagccgcacgtgccgggcgctggggattcgagccccgggcccagcctgatcgctgacggcggcggcgggcacagcggcagtctgtggggtggctggggcatggcgggtgcctgccccaactggggagacaaggcaccgcagggcaagctgcccatggccctggggctctggccgctgtgggttcaagacgaggaccagcctgacactggaagtgcgggcgcagaattagaggaggcacaattagaggctgaggcagagggggaagacagatgagcctccaaaataaaggaccctgggcttgcttccgaccttactccttctcagcctctacccccacttgtagcagctattcccgcctcatcagccagccctgcggcagttcccgtcgagccccgcccttttctacctatccccttctccagccccttcccgcccaattcacggccccacccctgacctttctcgcccgggtgggcatcacccccgtctcgccagcaccccttcgacttctctgacctcatctcctttctctatagctcgggttcatgacgctctcgatattcctgtgcagaaacctggaccacgtctacaaccggctcgctcgataccgttaggccccgccctccccaaagtcccgccccgcccccgtcacgtgcgctgggcacttccctgctgcctgtaaatatttgtttaatccccagttcgcctggagccctccgccttcacattcccctggggacccacgtggctgcgtgcccctgctgctgtcacctctcccacgggacctggggctttcgtccacagcttcctgtccccatctgtcggcctaccaccacccacaagattatttttcacccaaacctcaaataaatcccctgcgtttttggtaaaatagctttatcctctgtcagaacacaaacaaacaaactttgagaggggaggaaggaaaccgtctagctcagggctcacttaggagagggatgagattagaaagttcaacacactgcttgtgcagcggagataaagtcaagaccctagcacccacttataaatatctcgttatattaaaaaaaaaaaaaatgtccagggcccacctggctctgctcctgcacagaaagggttcatcttcactttgtgatctcacaggtcatggagtgagggtggtagagaggggcagaaatttcagggggaggggtggctgggaaaaagtaaaggggacaagccaatgtgtaactagcgctctccaagacatgcagaggagtgggggtggcctgtcaggggctgaaaagaaaagccagtgctgtacctggggggttgtctcactcctgtccccacaatccctgatactccggagtgatctgtcctttcagacacccactgtgaggtcccaatatcggggtttatcctttcctcagtcccagcctgttcagctctccaaccaagttttgggggcccctctaatgggggggatggccccagttgcttaggcctctgaggtcaacccctttacatcacagccctctccccaaataagaagcatgaggtgagctggaggaccctccctgggaggagggtgttctggggggtgagccagttttggggtcccccttcagtccctgaccaggcggtaaatgtgatgctgggccccacgctcgctggtggagacctcgaagacataggcggtgcagagcagcagttcctgggtgtctctgtttgtcaccacctgccaggaaggccaggacaagggacttatgcttagaagggagggcagggacccctgtgcccccctgccaagctatcatggaatacccagcaggctcttttccatctccaggaaacaggccgccaccatatcatgttccccaggagaaagggatgcccaaaagtcagttccctgggcaatgggggttacccctcagctgagcgttggcagttatggtgtatcacatctcagggttaatcgggttcccatcacatcacattccctgggtaaaaggggtccccatcatgtcacaagtaaagggagaaccctccctgcaggttccgcggtcaaggggtctctgcctcagcagtccaaaaagttaaaggggctcccaccatatcatgttccttgacaagctgaggatctgccttcgagtgccctccagtcagcttcaccagggaaggagggacccaccttatgtgcgagtgctgtggggctgggcgtggtggctcacacctgtaatcccagcactttgggaggcctaggcaggtggatcacttgaggtcggagatcaagaccaacctggccaacatggtgaaaccccatctctactaaaaatacaaaaattagccaggcgtggtggggcgtgcctgtaatcccagctactcgggaggctgaggca[137 bp omitted]gaagggtcccctaaactaagggtcaatggtggggtccccgctgcatcagtttcctagttaaaagagcctcaggctgagggctcactttggagtccctgctgtgtcagttcctgggtgaggagatcccctagactgagggtctgttataggtactgtccctccacactggggggccccactccagcccagccccaggcatcacctggaggatggtgaagttttccaggacgctgttcatcatgtatcgctcaggcagctgccgcaacttgtgcaagaaattcaccaggtactcgcacatgggcgagcgcagcaggcggtacacaaatctgccgtcctccagctgggcccgttccgtctgaaccaaggggaagggagttgggaaaatggtggctgagagacccacgggtcaccccaggaattgagctccaccctgtgcctctaagatgccaccacactcactctcactgccaccttcctttcatcaccccacccacagtgactggagactgggcctgaaccctcggagatccgaatcaggatctctgagcctgcaaatcacaagcccctcaaagtgattctctgaacccccaaagacctctggactcctctaacctcccagccctcagataccctccaaagacccctccatgacgtcttcaaactctgacttctaaacttgagacttccccaagtctccagcaactgtaagtgtgacttctgaaccttcttgccctaagaacctctccatatccataagacccttctcaatctcagtgactctaagtctctatactacacattacctgtcagcccgcagaatgatccctgcctgtgacttctgaactgcccattagctcccaacgcatgcattaaaccctcaaagaggctgggacccactccctccatgcatactcccaaatgcctgagtcatgatggcttctggtccattctgcacccccaagtgctgacccagagctccacccctccagcctcacctccaccttctccaccacctgcttgccaaaagagcagaccttggaggaacaggtgagggtcatgtgttccaggctctcatactggctgctcactccgtagaagccaccactgctgatgctgccaccggcccctgcctcctcaccacttgggccccagttcaggtccgcctgggagatgggaaggcacagatgagtcagaggggacatcccttataaacagtggggactaccaggcgcagtggttcacacctgtaatcccagtactttgggaggccgaggcgggcggatcacctgaggttgggagttcaagaccagcctgaccaacatggagaaaccccatctctactaaaaatacaaaattagccgggcgtggtggtgcatgcttgtaatcccagctactgggacactgacgcaggagaatcacttgaacccgggaggcagaggttgcggtgagccgagatcataccattgcactccagcctgagcaacgagagcgaaactccatcttaaaaaaaaaaaaaacacagtggggactctgccccatagcctaccattacccctgcagttcccggcttgattcttcagtgttgttttgtttttttgttgtttgtttgtctttttttttgggggggggggaacagggtcttgctccgtcacccaggcaatgtgtggtggtacaatcacagctcactgcagcctcgacctcctgagctcaagtgatcctcccatctcagcctcctgagtagctaggaccacaggtgcatgccaccacatccagctaatattttgtattttttgtagaaacagggtttcaccatgttgcccaggctggtctccaactcctgggctcaagcgatcctcccaccttggcctccgaaagtgctgggattacaggcatgagccaccgcgtcaggctttcaaagttctccaagggctggtttctggagaagatccaccgtccatcagcgttgaagaagtctgggtccccaaaacagtcttggccctgtctccccagtaaccaaaggagccctggaattcaatttcaaccttttttcttttcttttttttttttctgagatgaagtctcgctcttgttgcccagtgcaatgccgcgatcttgactcactgcaacctctgcctcccgggttcaagcgattctcctgcctcagcctcccaagtggctgggattacaggcgcacgccaccatgtctggctaatttttgtatttttagtagagacagggttttgtcatgttggccaggttggtctcaaactcctgaactcaggtgatccacccacctaggcctcccaaagtgctgagattacaggcatgagccactgtgtccagccaattcaacctttttcccttgaagcccgcaactcaagagttcagccccttccaagggcctggttactatggcagttacttcttagcaaccagttcaagatgaatacctccctctaagcccctctcactctggttgctaaggcaagtggctactccctagcaacgggacctcacggagcctgaggaggcctgactcctcctcagagcacttccccctcggccaaatctgagaggtcagactccctccatgaccccagtggccaagtgtgtgtagacagctggccaagtgtcactaggccaagtggggcctaaggaagcctaagagctcatcacacctttggtctgagtcacctccttgcgaggcgcacctcttcctcttcctaactttagttgctaacactgtgccaggtccgtcttctcaggggcccgactccatctctcaccgtggcaaaaccaaagaccttaccagctgctcctctgaaccccttcagcagctgggcttcctaagggggtggctctccagtcctgggacctgataaggcctgtcttaagccccaacaatgtctaagccctcagctgcacatccccagagcagtttcaggcttctgcttcacatggcagaaagctccagaaccgtgaacagcaagctccagaacaacaacactcccagcaagaacagtaaagttcaggccctcagcaggcctttccttcctttccttccttccttccttctttctttccttctttcttttctttcctttctttccttcttcctttcttcctttctttctttcggcagggtctcattctgtcacccaggctggagggcagtggcacaatcttggctcactgcagcctccacctcccaggcttaagtgatcctcctgcctcagcctccacagaagctaggaccacaggtgcgcaccaccacacccagctaatttttttcattttttgtagagttgaggtctcactgtgttgcccaggctggtgtcaaactcttgaacacaagcgaaactctcgcctcagcttcccaaagtgctgggaagataggagtgaaccaccacacctagccaggctttcttctcagagactagatccctccaccacctttgttactataagaactagcaccccctaaacatccaggcaacatttattgagcccaggccaggcactgtggctcacacttgtaatcccagcactttgggaggccaaggtgggtggatcacttgaggtcaggagttcgagaccagactggccaacatggtaaaaccctgtctctactaaaaatacaaaaattaggccaggtgcagtggctcatgcctgtaatcccagcacttggagaggccaaggtgagcggatcacatgaggtcaggagttcaagatcagcctggccaacatgacgaaactccgtctctactaaaaatacaaaaattagctgggcatggtcgtgcatgcctgtaatcccagctacttgggaggctgaggctggagaatcgcttgaacccaggaggcagaggttgcagtgagccgagatcgcaccattgcactccagcctgggcaacaagagcaaaattccatctcaaaaaaaaaaaaaaaaaaaacaataaaagaaaataaaacacatttattgaacccctgtagtgttagtcatcatactggacaccaaaccaagtagccctaagaaacacgcaagatgggccctcttagtcccaatcatataaatagcagctgacaccaggcgtctatataggaagtgctcaataaatgattgctacataaatacaggacttggacgggtgcggtggctcacacctgtaatcccagcactttgggaggccaaggtgggcagatcatttgaggccaggagttcaagaccagcctggccaacatggtgaaaccccgtctgtactaaatatacaaaaattagccagatgtggtggcgggtgcctgtagtccaatctactggggaggctgaggcaggagaatcgcttgaatccaggaggcggaggttgccgtgagccaagatacagccactgcactccagcctgggtgacagtgagactatgtctcaaaaataaataaataaacaaataaatgaatacaggacttggcaaagccactccatggctcttttcatcacttcctcaaagccagacattctctagcaacaaggtctggtgaaactgatgcaaagcatcagtcccctctttagaaaccagtctccacaagtccactggctacggggaggggtctttccttagcagcacggcttggtgcagtcaggtggggcacagggaagcctggaacatggcaagcccatgcccaggaccctattagctacatggccaggtaactcaccgtattagttacatgtggcaatgtctagtgggatccagggaggcccagacacctccaacccaccctgggggctggcctcctcggtgttccttgttgcaaagggggctgacactccaagccatgaggactgactggtaagtcccaggctgacctggtagggcccgcgacagattctctcagggccagaggcctttgctgggacaccacaggatttgtgagcacttttgattttgctgtgagaactcacccagaacttgaccaggaagaaggcatggggggggccacgatcatatagctctcggaggccaccctttttctcagggaatttgtcgtagatctgccggacgtccacactctcgagcggcggcgctccggggctggggcagtgctggctgatgtgcacgaacaggtgcctctggtactgaggagggttggccgtgggtgagaagtcggaggtgagctggatctccagcctgtgctgcctgagcccaccaaatgccgtcaccatccccacagctctggccagctgttccacacagtccacccagcactgggcctgactgccacccatcgtccccactcctgcttctgcacccagtcccctgcagccctgcagtcctacagtccccaactccctgccacaactcccccaactccatcctcactgcctcagcctcacctcaggcctcccaccctcaccccagcctccaacctcgcctctccagttcatccctcatgtggctccagacctgcccctgaccctcccctggtcatggccctcccatagctccccagcagccccagggcaaagctcacaccccctaggcctggtcctatatagaacaggtgctcataaatggtcaatggatggaagagtgaatgaatgggaatccacagaggtcttgtggttgatgttttgattgatgtttatatggtgtggcagagactgctacgtgttcacaaatcctggttcctttacacagtgtgaaactacatttcccaggccgctttgcagttaggtgtgaccacatgactaagttctggccaatgggatgtgaccaggcctgagagtcgacacatccaagtcagattcctaaaacctcctgcacaatcttgactctctcccttcctccatctgctggccagatgcagagactccatcagcagattctgaagccttagaaaatggcagagccacaaaatggaaggagcctggatccccaaatcacttgagtccaaggctcctgctgaacctacattgaaatgttacatgcaacttatctggcattcagtccctaagagttaggagctgtttcttctaacagtcggcccactccatcctagcccaggagaagctcaagcacagaaataaaatcttttccaagttcctagtatgcatcacaaagcctagtgaacagtagaaactcaaacacgtttgataaatgaatgaatgatgtcctggggagcttttctgaccttcccaacttgtcaccctatgaccttccagttcctttatgctagtagttctcaaagtacggtccccagaccagctgcatcaacgcacctggtagcttattagaaatgcaaattctcaagccccacatcacatctagcaaatcagaaagcaatctctgttttaagaagcccttcagatgattctgatacatgctaaagttttaaaaccatgactttatacattcccttcctgtcaccctctatatttcaaaatccctcagcgactgtaccaaaatttcactcacagaatcaactgcatctggcggttccacgaaggctgagaactctaccagctgcaaccgggcggtgcccaggccccgagcctgccaggctgggggcgatggggtaggtgggggcaggggtgagagggcttgggggggctcgtaccctagagagagagaagaaagaacaatacaaattgctaacatttatggaatatatcaggtactgttgtctcttgcctgcctccacttagaagctgaaaaagctaaatactcactttcccagcctcccttgcagttagaagtggccatgtgacacagtcctagccaatgagacgttaggggaaatctgctggggggcttctgggaaggagtttcttcctgaatgaaaaagacagaactttgggaggagaaagcttttggccctggccaagtcctgcttgggagattgatatggtttggatatttgtcccctccaaatctcatgttgaaatgtgatccccagctgggcacggtggctcacacctgtaatcccagcactttgggaggccaacgcaggtggatcacaaggtcaggagattgagaccgtcctggctaacatggtgaaaccctgtctctactaaaaatacaaaatattagctgggcatggtggcacgtgcctgtaatcccagctacttaggaggctgaggcaggagaatggcttgaacccagga[137 bp omitted]tgggggtggatccctcatgaatgtcttggtgccttccccatagtaacaagtgaattctcactctttgagttgatgtgagctggctgtttaaaggagcctggcttcgctctcttgctccctctcaccatgtgacatagtggctccccttccccttccaccatggtcctaagcttcctgaggccctcaccagaagcataggctggcaacatgcttcctgtacagcctgcagaactgtgaaccaaataaacctcttttctttataaatcacccagtttcaggcattcctttacagcaatgcaaatggaccaacacagacatgatccctggagttgcaacagccatcttgggacaataagacagacatgagaggaactacagagattccagtcctgatattgctaagcccacacgggaacagcccacctccaggctttttgttgcatggattcataacatgaatgcttttactatttaaggcacttttaatgtgggtcttctgttacttgcagccaaaagtattcctaattgataaatctatggaaactaagggactccctctttcactgatgtgagttctcagggccatatcagcatggacttccagaagccatctttgctgccaagtagctgagtctgcctgggaatgaagccaccacagtggaaagcagatcaaagtaatgactgatgccatcacttgagccgctggatccagccacgcctgaggccataattctgaactgtcagttactggaaccaataaatcaatacatttttcttattattttttattttatttatttatttattttgagacagagtcttgctctgtcgcccagtctggagtgcaacggtgccacctcggctcactgcaacctctgcctcccaggttcaagtgattctcctgcctcagcctcccgagtagctgggattacaggcaagtgctactgctaccacgcctggctaatttttgtattttttagtagaggttggggggggtggtttcgccatgttggccaggttggtctcgaactcctgacctcaggtgatccacccgcctaggcctcccaaagtgctgggattacagctgtgagccaccgcacctgcctcttcttttttaaaatgttgcttcagctggcttgatttggatttctatcacttgcagctgaaagaatcttgactaacatacctcccccatgtctcataagctagcaagtggcagaacacaaacccagtgtgtggctgcaaagaccaaaatctcctaaccatcaccagttccaccactcagctctccagcccctcccggctcccccgcccccaacacacacaccctgcctcaaagctgggcttcagtaagaatgtatcccctaattggccgggtgcggtggctcacacctgtaatcccagcactttggaaagccgaggcaggcggatcacaatatcaaaagatcgagaccatcctggtcaacatggtgaaacccgatctctactaaaaatacaaaaattagcccggcatggtggcgggcacctgtaatcccagccactcgggaggctgaggcaggagaatcacttgaacccaggaggcggaggttgcagtgagccgagatcacgccactgcactccagcctggcgacagagggagactccatctcaaaacaaaacaaaataaaacaaaaaaaacaatgtatccctcaattgatggaaggttgaaggaaaggcagtaggggtcgaagagagagaggggagacaagggagggtggagcgcaggctcttacctgggaggtcagtagatgggggagtcagtgacaaggtgaacggtgtctgtgagaatggcttcacactgagggaaaaaggaagccaggggttagccaggtagaaagatgctaatgtcaccagcaaatgtttactgagaggccacaacaagcaagaccctgtgcattttgtgcacaatctcactgaagcctcacagtgcgtgaggtaggtagaatgactgctcttttcattgcacaaatgaggacaactgaggtatagaggggtcaactgacctgcccaaagtcacacagttgagatgcagcagagctgggacttgaacccaggtcagtctcagcccggtatctcaggctcttgatgatgacattttggtatctctcacaaaatgtcagaaagagaagagaaaccagcctggcgtggtggctcacacctgtaatcccagcacttcaggaggttgaggcgggcagatcacttgaggtcaggagttcgagaccagcctggccaacatggtgaaatcccatctctactaaaaatacaaaaattagcagagtgtggtggtgcgcgcctgtaatccgagctattcagggggctgggccaggagaactgcttgaacccgggaggcagatgttgcagtgagccgagattacgccattatactcctgggtgacagagcaagactccatttcaaaaaaaaaataaaaagaaagaggagagaagagaaaccaagtcttggaaggcagggagaagacgcagaagacaaggaatttggaggaagaagaggctgaggggttgggagggtgggaagaaaatgaccaacactcaggagatgggacaggaggccaaagtcggggtggggaggcagcactggccaatagaactttccagggatggaaatgttctattggatggaaatctgtgccatccaatacggtacccagtgcccacatgtggctactgaccacagaccacgtggccactgagcacaagtgtggctcatggacctgagaaacagaatctttaattttatttaattttaatttaaatagctgcatgaggctagtggctacagtatcagtcacagccctagtagcccaagagatagtggtgaagagacttagatgtcagaggtcagaccaggcgcagtcgctcacgcctgtattcccaccactttgggaggccaaggcaggaagatcgcttgagcccaggagtttgagaccagcctgggcaacacagcaagaccccagctctatttttttttgagacagagttttgctcttgttgcccaggccggactgcaatggcgtgatcttggctcaccgcaacctccgcctcctgcattcaagcgattctcctgcctcagccttccaagtagctaggattattacaggctgtgccaccacacccagctaattttgtatttttttagtagagacggggtttcactgtgttggtcaggctggtctcgaactcctgacctcaaatgatccacccacctcggtctcccaaagtgctgggattacaggcatgagccactatgcctggcctccttttcttattaattctttgtttatatgtttattgtctgtctcctcccccgcccaccaaatatatgaagctccgtgaaggcaggaatttcacctgtcttactgctgtgcccccaaaccaagcacagtatcaggcacttagtaggcactcaacaaatactggactggcctcctctagattcctggaacccagaaagatctcctacctgaggactttgtcgtgtgctattgtgtctgcctaatatattcccactcccattctttttttttttcctttgagatagagtctcgctctgttgcccaggctggagtgcagtggcacaatctcagctccctgcaacctctgcttcccaggttcaagcgattctcctgcctcaggctccggagtagctgggattacaggcgcacatcaccatgcctggctattttttgcattttaggtagagatggggttttactatgctggacaggctggtctcgaactcctgacctcaagtgatctgccctccttggcctcccaaagtgctgggattacagatgcgggccaccatgccgggcctcccactcccattcttcacctggctaagtcctacccggccttcaatgttatcttctcagagaaacccctagaactttctcctccaccccagaacctgctgtggttcttcacagcacctcacacattcttcgattttctgtttatgcaggtgatgatttgatgaacgctcatttcccccatttgactaacagctccatgaaagcggaaaccccagcgtcagggcagtgcctgcccagccccctaccttccagctaagcaacccccctgcaaaaccctcagcccccaggtacttgatctgatgcttcccgtatccccattcagcagcagctccccagtgaccttccttctcttccagtctagatcccacacagcctgtcactgcactcttttttttttttttgagctggagtctcgctctattgcccaggctggagtacagtggcacaatcttggctcaatgcaacctctgcctcctgggttcaagtgattctcctgcctcaccctcctgagtagctgggactacaggtgcctgccaccacgcccagctaattgttttttgtttt[176 bp omitted]gcctcaccgtcctgcagccacactacccaaccaatgcctagcc[137 bp omitted]acatagcaagacccccgtctctacaaaaatcaaaaaattagccaggtgtggtggcacatgcctgtagtctcagctactcaggaggctgaggcaagaagattgcttgaacccaggaggctgaggctgcagtgagccatgattgtgccaccgcaccccagcttaggcaacagaagaatatcctgtataaaaaaagaaaaaaaaaaaaaagcacttcccatcatcttctggggcccatttctattcttgtaggctacaaacatatcccgtcacctcaaggctctctcagaactgaaaaggacactcccacttacctctgggaaacattttcttccttctgaacctaagagaagattaattataacctctgttctaccctcaggtccaagaaccacctaatagaggctgggcacggtggctcacgcctgtaatcctagcatttggggaggctgaggcgggtggatcacgaggtcaggagttcaagaccagcctggccaacgtggtgaaaacccatctctactaaaaatacaaaaattagccgtgcatagaggcaggcgcctatagtcccagctactcgggaggctgaggcaggagaactgcttgaactcaggaagcggaggttgcagtgagccgagatcgcaccactgtactccatccagcctgggcaacggagcaagactccatgtcaataaatacatacatacatgcatacatacatacatacatacatacataaatggggggacacaggagctagaaggtggagtgagaaaggtctctgtgggagtgtgagggtggggggcaggtgctgagccaggacacatagtactcactctggaacattccaggggggcccagatcctccagaccaaaactggaaaagctcagaggcctggataggacacaaagaaaaatggttggtcagtcccctgtggacagctgcagccccatccatccccctttgcccccacgtcccacaatccccaacctggaccacctgaggaccagtgggacccagtttggcctgcagagaaggcgcggagatgagctgggcagaggacatggttgccattgtctggaaagccttgtccttggaaacctggtcctggaggaggaggcggaagttcatgtgagaggggcatctcagtcaacatggcaagagggggatggtgccagggtggggtgaagacggggaggtgcagaggtggggagtcaaggcaaagggttagtggccgggcatggtggctcacgcctgtaatcccagcactctgggagccggaggcgggcagatcacttgaggtcaggagttcagtatcagcctggccaatatggtgaaaccctgtctctactaaaaatacaaaaactagccaggtgtggtggtgcacacgcataatcccagctactagggaagctagggcacaacaatcactggaacccaggaggcagaggttgcagtgagtggagatcgtgcccctgcatccagcttaggcgacagagcaagaccctgtctccaaaaagaaaaaaaaaggcaaaggcttgggttgggggagggttgaacctctccccacagccctctgcccctcctcagggacagggcactagtttggagtgagcgtgggtgggaggatgggcagaggaacttaccacgttcagagcctgcccgtgggggtgggggagggtgccaaaggaggaaagaaaacatgacttaggaagtacggcccggactcccccacctccctgccctacccgcccgcacagccccgccaccctgagctgagcagtgccaagggatggatgcgcaacaggaagtggaggtggccagccctggaggggaaaaggggctccctgcccagaaagacagtgatgggggtttctagaacaaggaaacccagaaggttcccagatgtccaggagacaggaaatgagaatttcagagccagcgggaagacaaggtaaatgtttcctaatccagacagaacagacagggaacacagaaggtcgagaacagaccggaagggaagggtttcagacctagagagaaagaaagggaaagctgctggatacaaaaaaaaaaaaaaaaaaaaaaccagaagcgaccgtccccaagtccagaaaaagagacagaaaaacccccacacacccagaagggggagaaaatgagggtctccggccaacaggaaccaggaaatccaaaggatgaggagaaggaaatgaatgaggaatctccaccaggaaatgaagatttctgggcacaaagagtaggcaggtcatgcaaaggtcaggaaatgggaaaacaaaccagcggagatgaagaggaggccttcacagcacaagagggggaagatatgagaccgccaggaagagggaaaggagggacaggagcagagggaagggagggggacaggaacagtggtcaagggaggggaccgacggcccatccttcctgctgtcctgagcaaaaccttcagcctcctccatgccatcgctccctgcccagggtctcagcaaccgcaccaccatccctatgcatctccctttgtgggccactgactccccaccctggatgactgcaccccccgccctgaccacagaggtccctcacctgaggtctctgtccccctctgtctctgggtctctgtctccctctgtctctgggtctctgtccccctctgtctatgggtctctgtccctctctctctgggtctctgtcctcctctctttctgggtctctgtccctctctctctgggtcttggtcccctcccccaagtctctgtccccctctccctgggtctctgtccctttctctctgggtctcagtcctccccgctctaagtctctgtccccctctccctgggtctctgtccctctctttctgggtctcggtcccccacccccagtctctgtccccctctcaggatgtctgcattggtccctaccttcaacttggactggatttcccttgatttccttcgggccaaaacctggatgtgactagaaacctggaaggatcaacggagaagcagattcaggccacagccaccgcccctgtgttcactaccccttctctccctccaggtgcctcactgagctgctggaccatgaaaggtgaaaaacacactgaagatgagagccatctcgggagcacccgaacacagatgtccataaaggagctcgtgaacaccacggaccctcccgggacccatcccatccaggcctccttcccctccaccatgctctctctgtggctactctgggtctaacacaaccactagaaaaactatccccaaacaggcacagtgagagcacacgaacagacatgctgatacagttcggacattcgtcccttccaaatttcatattgaaatgccatctccagtgttggaggtgaggcctggtgggaggtattggatcatggaggtgaacccctcatgaatggctttgcaccatctccttgatgatgagtgacttctcactcagttcacacaagatctggttgtttaggccaggtgtggtggctcacgcctgtaatcccaacactttgggaggcctagatgggcagatcactggaggtcaggagttcaagaccagcctggccaacatggtgaaa[142 bp omitted]tctactaaacatacaaaaaattagccaggtgtggtggtgcgcgcctgtagtcccagctactcaggaggctgaagcaagagaatcgcttgaacccgggaggcggggcttccagtgagccaagatcacgccactgcactccagcctgggcaacagagcgagactccgtctcaaaaaaatatttaaaaaatgaaaaaataaaaatttgccagatgtggaggcgcatgcttgtaatcccagatacttggaaggctgaggcagcagaatcgcttgaacccggaaggcggaggctgcagtgagctgagatcacggcactgcactccagcttgggagacacagtgacttttctctcaaaaacaacaacaacaaaaagatctgggtgtttaaaaagagtctgggacctctgtctttcttctgttgctcccactttccatgtgccaggcctgctcccactaccccctccgccatgattggaggcttcctgaggcctcaccaggagcagatgccagctccatgcttcctggacagcctgcagaactgtgagccaaaataaagctcttttctttctttctttctttttttttttttttgaggtggagtctggctctgtcaccaggctggagtgcagtagcacgatcttggctcactgcaacctccgcctcccgggttcaagcgattttcgtgcctc[134 bp omitted]agtgctgggataacaggcatgagccactggcccagcctaaagctctttatcaattatccagccttgccaggcacagtagctcacgcctgtaatcccagcaatcccagcactttggggggctgaggtgagtggatcacctgaggtcaggagttcgagaccagcctggacaacatggtgaaaccccatctctactaaaaatacaaaattacccaggcatggtagtgcatgtctgtaatccctgctactcgggaggctgagacaggagaattgcttgaacccgggaggcagaggttgcagtgagccaagatcgcgccactgcactccggcctgggcaacagagctagactccatttcaaaaaataaacaaatacataaataacccagcctcgggtaattctttatagcaatacaaacggactaacacacatgccgagaagacagatgaacgcacaggaagcagcttcttccttgaacctgaacctgcccatgcgaggatgaccctaagaagaccggcccatcccagacagaagcccacaagtccattccgagacctgttttcgagttcgggtcttccccgttctcagcttgatgtagcgggcgatcagttcattccgacctgaagattcaaagacggaacagagttagttagactttcaacagaacttccccacagcatggacaccagggaagaagaaagcagcatgggtccccaaaggtctgcagcaagtgggctgccggtcccctcagctacgtggaagccagactgcttgggttcaaatcccagctccatcacgcactggctctgtgcgaccataagcaaatcacttaacctagctgtgcctcagtttcctcatctgtgcaaatggtgatgctagctcctacttcagagtgctccataaaccttggttactgtcattattcatcagtgggggccagggcaaaagacagaagtagactcaccatacatcttgccttcatcagacaaaattattttccggcggccgcagggtggatagatggccagggcctcctggaagctctgctcaatgtctgggctccacaccccctctgcatccgggcccccgtcacccccagccccctcactgccgccggtaccctcctcactgccttcctcactgcccgtccagccgctgccatcgtccagggcggccccagcccggggttcccccatctgggcctggaggaacacagaactcagcaagcttcccccaaaccccaccctcaagggacttgaagctgagagggctgggactctggaccactgggtctgagggaggaggggctggggacctggactcctgggtctgagggaagaggagctggggggtattcctgggtctgagggaggaggatctggggcctgaactcctgagtctgagggaggaggggctggggcccggactcctaggactgagggaggaggatctggggcctggactcctgggtctgagggagcgggggctggaggcctggactcctgggtgtgagggagaaggggctggggtctggactcctgagtctgagggaggagaaggagctggatttcttggaaagctgaggatgggagtgttctcagagtttccagaggaactcaattgtgatgaagtcacaatgattaccctagagtaatgccgagggccatgaaggctaaaggttcgggtatgaattacgggttttaaagaagacaggaggcaaaagttagtggtggggaaggaaggtgtgggtgaaacttcccctgtcccaccccaagaacaggtggtaagatgtgagcagcagctgccagaaaagaagaggggccaagcaagactgaggggaggtctagagagagggggacagagacccagagagggagggggacagagacccagagaggggatggggacagagaccagcaagggggggggacagagacccagagagagaaggggacagagaccagagagagagggggacagagaccagtgaggtggggatagagacccagagacagagggggacagagaccagagagagaaggggacagagacccagtgaagggggggacagagaccagtgacggaggggacagagacccagagagagagggggacagagaccagagggagggggggacagagaccagagggagggggggacagagaccagagagggggacagagacccagagagagggacagagacccaaaaagagagggagacagagacccagggagagggggagacagagaccagaaagagggggacagagaccgggggggggggacagggaccagagagaggggtccagaggcccagagagggagacagagacccagagagagagggtgacagagacccagagagagggggacagagacccagagagagagggacagagacccagagagagaggggaccagagacccagagagagggggacacagactcagagagagggggacagaggctcagagagagggcaacagagacccagagaaagggagacggagacctagaaagggcagggacagagactcagggcagcagctgaggccgagaccaggagagacccacagaaccacaagctgggggacaggggcgccctgccatcagaagagccagaacaaagggcccaggcgtcccctcccccagcttcccacaacccccatcaggggaggggcttgccggccagggcgactcccctccggcaccgggccccgcccctcccctcccccgtgcgccgtgggctctgatccaactcaagttcccagtgactttccggaggccgggaacagggaaaactttttccaatacagtcagatcccgcctccccggaggctccatgtcctccacagctttcccaggaccccagagtccaggcccctattcccctcctcccgccgaccatagcagacaaagaccccagccaagcccagtggcgctgcggcgttcaggacccccgtaggccaaaatcccagcccagcccttccccatgtggccagacaaagggacggtggagccgggtaagaaaggtccccctaatttcccgccccagaccctaaacctccaaagaggcaagacttaagatccagaaagccccgtaacctcccctcggccaccccagaggccctcccttctccgtaagaaggaccaaatgccccccagattacacaaggggtccttctcactccaaagtgacaccgccgcagacgcacgccccacaccccgccagcgcccttggcccgcacccgctcctgcgcgcacgcccaaactcagacccagccgcaggcaccctaactccggccagagttcccactcctcactgaggctcggtcacgggagcaaattcgggcccccgggcaaaaagagggctgcgaaccattcagagacggtcccgcaaacgcacgcctcacctcctaagaagcaactccccaccccaactcacacaccccaaagcaggatccccgactcccgccggcgccttcctacctcccggcctggggctggggagccgcgggcgggcggggcgctgcgagggagaaagttgccgggagctttgtttgggaaaagtgggagggaccggaggggggggcgggcccggccggcggacagcgggaagggggatccgacggtgacagtttggggaaggatttttgctttgggagagattagtctatctcggggctggtaggaactcaggatttgggtgcttgggaaaggagggggattgggggttcggactccaagtcggagggaaaaggctgataggagccagaaacccctgatctgagggaggagaggctgggggctgggactcctgggtctgggggctgggactcctgggtctgggagaggaagcggctggagagagatatgggctcctaggtctgagaggggacggggctaggcgcctggaatcccggctaccctcgtgtttgtgtattgggggtgcggaagtgatacgaatacaaagagtctttactgttaagccctgaggttttttttctttttttctgtttggtttttggtttttttgttttttgttttttttgtttttttttttttttgaggattggggtctggggatgggttttgactgattcctatgacgacctggtttccttgtgacctcaccacagttaagagtcgtgggcaggaccaccgggagtttattggaggcccacgtaggtgcagattcctcatctacaggcgctagtggactggagacggctggcggctgtcccgggacggggaagagagctttggtgcctgagggaagatggcttagggcccggtcccttaagggtgaaaggctgcgtgttcaaaattacgggactagagggggcgggagtccggacctgaggtcctcagggaaaaggaagtctgattctgggttccttggaagatgaaatataagactggatttagggtttccggagacaacgggactttttagtggagcgggagcgggaaaaccagaagggacacggagaaaaggttccgaaacagatacacaattagagtgagagctaaaagggatgcttgtactccggtgtctccagtaggaggagcctaggactggaacttggggtgatgagggcaagatctgggacgcaggggcgtggtccagtgcaggggcgtggcccagtgcaggggcgtggctttcagccaaggggcgtggccattgcgattgggcgggactccgaaacgagggccgcaatcagagaacaccgccaggacttccaggacttggtctccaggactgaggtcaactgacgtgggcgtggtctgactgtgtgggcgtggccagggaatgaactcacggctctggcttaaggggtgtggtgaacgaaggatggggcgtggctgtgtcaccaagggcgtggtcatggagtagaggcccgggctcctgggtgaggccggcaagtttggagcgtggtcagacaataggggcgtggctacggctcgcggagcgcaaccaacgctctagaccagacctgggctcgagaccataactgtttggctttaacagtacgtgggcggccggaatccgggagtccggtgacccgggctgtggtctagcataaaggcggagcccagaagaaggggcggggtatgggagaaggtgaggattgagatctggtggtgaacgtgggcgaaagtgaggaaaagaccattggatgaggccgggtgctgtggcttacgcctgcaatcccaacactttgggaggcccaggtgggcggatcgcttgagatcaggagttcgagaccagcctgggcaatatgtcgaaaccctgtctctacaaaaaatacaaaaattagccgggcgtggaggcgcgcgcctgtggtcccagctacttcggggggctgaggtgggagaatcacctgagcccggggaggtcgaggctgcagtgagccgtgattgtgccactgtactccagcctggactacagagtctcggtctcaaaaaaaaaaaaaaaaaagcatatgagacagaacccagaagagccagacctgggagaagacggggcctggcaaggtggagggtgtgggagtagaagaaagaagcagtgggggaaatgagcgcggtgtgggagttgcctgaactggggaggcgacctgggcaaggtgctggagaggggcgtcttgggtgggggcgtggccactgtgcggggctctgaccccgacccttgccacagcctccccacctgcccccgcaaggcggcatctgctggtcctgctgctgctcctctctaccctggtgatcccctccgctgcagctcctatccatgatgctgacgcccaagagagctccttgggtctcacaggcctccagagcctactccaaggcttcagccgacttttcctgaaagtaagcgatggcggggggatgggggaagaagtactgagaagaggttcagggacacagagtgggagatggttcagggccaggcagggggacagacaggatgagagggcaacagggagaccaagagataggaagagggaagggactgggcccaggctataatcacagcactttgggaggctgaggcagaaggatcattggagcccagtacttggagaccagcctgggtaacatagtgagaccctcatctgtacaaaaaaatataaaaaatagttgcaggtacatgcgcctataatcccagctgcttgggaggctgaggcagaaggatcccttgagcccaggaggtcgaggctgcagtaagccatgatagcaccactgcactccagcctggatgacagaacaaggagaccctgtctctaaacaaataaatatatacgtgcataaataagagaggaaaggtaacaggcaaagagagaggagatgggacagagacaagagactggggaaagagacaggaggagagggggatggggacagaagaggaacagggatagtaaggcaatgggactgagaatagagagagaattcatgggggatggaggccggaggttaggccctaagtatcagagggcagaaagtaaaggggatgggagggacttggggcaaggcctcgggagcatcctagcagggctgcagaaggggctgtactgaggagatgtgaggtccagcagctcaccagtccctcctccggccccagggtaacctgcttcggggcatagacagcttattctctgcccccatggacttccggggcctccctgggaactaccacaaagaggagaaccaggagcaccagctggggaacaacaccctctccagccacctccagatcgacaaggtgcctatgcagggaagcccttcctgaagtccccttgggatccctccatcccgccatccctcgtgctgcagtatctgttgggagggaaggagggcggaggaggaaagcaggtttgctctcactctctcatcggatcctcacagatgaccgacaacaagacaggagaggtgctgatctccgagaatgtggtggcatccattcaaccagcggaggggagcttcgagggtgatttgaaggttaggacgtgccccgccgtcaaagtgtccaggcccaaacattttctttttttcttttttaaagaagagtctcactctgtcacccaggctggagtgcagtggcacgatcttggctcactgcaacctccgcctccgaagttcaggcaattctcctgcctcaagctccttggtagctgggattacaggcacctgccaccacgcccggctaattttttgtatttttttagtagagacagggtttctccatgttggtcaggctggtcttgaactcctgacctcaagtgatctgcccatcttggccttccaaagtgctgggattacaggcatgagccaccatgcctggtgaggccctaacattttctgtagtttaggaggacaagaagaggaactgaccctcttactcctctgtgtggaacttcctccttctgagcctcagttttgccatctctcaagtggggcaatccaactgtcagaaatgagatttttgacctcagaatacatctgcaagggtttagtagaccctagagggttttgtatcaaagtggttttcttttttttttttaactacataatagtcaatcaaagtgtttctatgagcaccaaaatgttttataaaccaagaagggtttttaattctaagtgcttggaaagcttcaccctcataaaccccaaattgtgtttttgtctcaaagtaagtgctctgcaaacttcagagtatttttcaatctatcccaaagtggttggtaaacctctccattataaactccaaaatgtttttgttgttattgtggttttgatttttggggttttttttgtttgtttttttggtttttttttttgagaatggagtcttgctctgttatccaggctggagtacagtggcacaatctcagctcactgcaacctccaactcccagactcaaatgatcctcccacctcagcctccggaatagctggaactacaggcgcggaccaccacacccagctaatttttctatttttagtagagacggggtttcgccatgtttcccaggctggtctcgaactcctgagctcaggcaatccgcccgcctctgcctcccaaagtactaggattatagacatgagccaccacacctggcccaaaatgtgattttcttcttctttttttgttttttttgagatggagtttcgctctgttgcccaggctagagtgcaatggcacaatctcagctcactgcaacctccgccactgaggttcaagtgattctccagccctagcctcccaagtagatgggactacaagtacgtgccaccacgtccagctaatttttgaatttttagtgtagacagggtttcgccatgttggccatgttggccaggctggtctcgaactcctgacctcagctgatccacctgcctcggcctcccaaagtgctgggattataggcatgagctactgcgcctggcccaaaatgtgatttttaataccaaagagctgtatgaatgctaaatgcgttgtgtatttcacctttggtaaacttttttttttttttttttggagacgaagtctcgctcgtcccccaggctggagtgcaatggtgcgatctcagctcactgcaacctccatctcccaggttcaagtgattctcctgcctcagcctcctgtgtagctgggattacaggtgactgccaccacacctgactaatttttctatttttagagagacaaggtttcatcatgttggccagactgctcttgaactcctgacctcaggtgatccaactgccttggcctcccaaggtgctgggattataggcgtgagccaccatgcctggccaggccacctttggtaaacttctacaagtgattctaattatgaagtgctttgcaaaatcagggtatttttaatcctgaaaagttttaagaaacccaaagagcttgatacatccatatgatacccacgtacacccatgcaatatcttcattttaaaaatgtttatttaaaattttattttaaaaatttcaggacaggcacagtggcttacacctataatcctagcaatttgggaggctgaggcaggaggatgacttgagcccacgagtttgagatcaccctgggcaatagagggagtcttcatctctacaaaaaaatttaaaaagtaggccaggcatgctggcttacgcctgtaatcctagcaatttgggaggccaaggcaggcagattgcctgagctcaggagttcgagaccagcctgggcaacacggtgaaaccctgtctctactaaaatacgaaaaattagccgggcatggcagcctgcacctgtagtcccagctactctggaggctgaggtaaaagaattgtttgaacccgggaggcagaggttgcagtgagccaagatcatgtcactgcactccagcctgggggacagagtgagactctgtctccaaaaaaaaaaaaaaaatcaaaaaagtagccaggtgtggtggtgtgtgctgtggttccagctacccagaagcctgaggtgggaggattgtttgagacgaggaggttgagtctaaagtgggcccagatcatgccactgcactctagcctgggcaacagagtgagactctgtctcaaaaaataaataaataaataaataaataaaatttcaagactacagaaaagttttttttaaaaaacatactttattattttggaaatggagtctccctctgtcacccagactggagtgtagtggtgccatcttggctcacagcaacctccaccttctaggttgtggaaagtaaaaaagtttctctttaaagtttttattaaataataaatcacaagtgttagaaataatatttttaattaactttttttaagcctctttgctttgtgttagtaactcttttttaaaccatatcttatgtagttgttagatataaggaaataagtaccttctgtgtccttgtacgttaaccaagatatttggtctcgacgtgctcaagcatgtcccagctcacagcttatgccctttccttatttggaaatgttattacttctccaagtcttttggcaagcaacttcctcttttcctttgttctccattgcctttacctatttaagaaagttttttaagttgttagccaattgggtttagcttagactgtgaggtccagctccaaccaatggagacaggacacagcagtaaggacccaatgcataagggataaatattcctgcctttctttgttcattgtgctctcctggcaggattgctgatgggcagcaccctttctacagaaagtaaaattgccttgctgagaaaactttttgtctgaatgctaatttttccttgcgacaccaagaaacaagcattttgattctaacacaggttcaagtgattctcctgcctcagcctcccaaagagcagggataacaggcacgcactacaatatccagctaatttttttttgtttgttttttgttttttgtatttttagtagcgatgaggttttg[132 bp omitted]ctgcccaccgagctactctgttcctggcttagagaaccaggagaaggggaaggggaatcacctgccacatgctggaggttggagcctgtggcaccatggcttgcctcactgcagttggtggtggcaacagaggctgcagtgtggccagagtggcttttctggctttgcccgcccagccactctgagaaaggctggaggagaaagtgaaggaggagtcacctgtggtgaggtggagtttggagcttgcagatggcacggctctgtggctcacctcctacagttgtggcggtgacagcgagggagacttcagcctgactggagtagaagggtgctcgtgaaggctagagtattgcctccaagatgcagcagtggatactcaggtttcaggagactccactgtccatggcgaatccatggtctgccagcgcagttttagagagagaatgtgccaccgcaggtgtcatcctcatgtgcaccctggcaggtagccatctgaagatttcaaggacaacctggcaggggagcagaccagcgacacttcctctgaacaggttcttgctgttcacttgacagactcagcaactcaggcaagtgttcacatggaagatatcctggaaggataccaagccagtgaaagctcagatgaaaatgccccatggctttggaaggccaatgaatgtgccaaggaaaaaggtgccatggaggatcctctggaagacctcgccaatgaaatttcagattaggacaccccactggatttgaaggccaaagaacgtgccaaggaaaaagttcccatggaggataccctggtggaagaccttggaaacgaaagctcagataaggatgcctcactggacttgaaggttgacaaacgcatgaaagaaaaagttcccacagaggataccctggtgaaagaccttgccaatgaaagctcagatgaggacgctctactggattgaaggctgatgaattcaccaaggaaaagttcccacggaggataccctggtggaagaccttgccaacaaaagctcagatggggatgttttgctaaatttaaaggctgacaaatgagccaaggaaaaagttcccatggaggataccctggtggaagacctcaccaacgaaagctcacatgaggatgctccactggatctgaatgccgacaaatgtgccaaggaaaaagttcccatagataatccagtgaaagaatttgccaacaacatcaaggaaaaggaggccccatgtaatgtgaaggcaccctagggagtccaggtaaatgatttcaaggatgacctggcggggatggtgatcagtgaaaagtccccagaagcagccctatctcttcacagggcaaaatgagatgccaagaaaaaagattgcttcgccattcttgtagcagagcttcctgaagagatgtcctcagggcaagtgctggccgttgtcaccgtgaaaggcatcaagaaaaatggtggctctgaggacagcttttctaaaaccagtaatgacaaagactcttcctgtagtggagacactcaagcttctggagcagatatggaagagtccaatcatgcagatgaccatcagcatatgccaacaagtactctcccagcacctgcagaaaaaacaatagagacaaagcctgaaaaggcagaagaaatgtaacccagtgagttcaaggaggatgaggatgctgaagagcctgacctgacctgttgtgacctttgttttttatgctagaagtccctacagattttttgaacacctggaagggccgggtcacaagacctcaccctggcccagcaaccatctggaccgtgagagttttggggattttgctactctctctggacttttacattctcttaattttttaaaaaatattctttctttaacctgttttaagatgcaagctgtcattgcgtcatcatagttacattttattactcaaataatttttcaattgttttactagttttttttggatctttgtccactggttttagagtttttgtaattttgataaatgatcttttatgctttgtatcattttcttaatgacttaccttagtttttaacaaatccatggtacagtaagttatattaagacatagtatttttatgtttttttaaattatactttgggttctggggtacatgtgcagacatgcagttttgttgcataggtgcatgtaccatggtggtttgctgtacccatcagcccgtcacctgcattgggtgtttctcctgatgctatccctcccctgaccccccaccccccaccgacaggtcctggtgtgtgatgtttcccttcctgtgtccatgtgttctcattgttcagctcccacttgagtgataacatgcagtattttgttttctactcttgtgttggtttgctgagaatgatggtttccagcttcatccatgtccctgcaaaggacattaactcatccttttctgtggccgaatagtattccatggtgtatatgtgccatgttttctttatctagtctatcactgatggacaattgggttggttccaattctttgctattgtgaatagtgccataataaacatgcatgtgcctgtgtctttatggtaaaaaaaaatagtataataaatatccctatagtctcttttccataaaccaaaatttcttaaggttggcatcattggcatgtggggctggataatctttattgtgggagctgccctgtgcactgtaggatatttgataacatccctgggctctatccactagagagaagttgcctcctgccaggcacagtggctcatacccgtagtcccagcactttgggaggcagagacgggcggatcatgaggtcaggagttcgagaccagcctggctaacgtagcgaaaccccgtctactaaaaatacaaaatatggggccaggcacagtggctcacacctgtaatcccagcactttgggagaccgaggcaggcagatcatgagatcaggatatcaagaccatcctggctaatgcggtgaaatcccgtctctagtaaaaatacaaaaaaattagccaggcatggtggcaggcgcctgtagtcccagctactcagaaggctgaggca[225 bp omitted]accccgtctctactaaaaatacaaaattagccgggcatggtggcacatgtctgtaatcccagctactcaggaggctgaagcaggaaaatcgtttgaacccagaaggtggaggtcgcggtgagcgaagatagcaccattgcactacagcctgggcaa[138 bp omitted]atggtgaaaccccgtctctactaaaaatgcaaaaattagctggcatggtgccatgcccctgtaatcccagctactctggaggctgtggtgggagaatcgcttgaacccaggaggcagaggctgcagtgagccgagattgtgccactgcactccagcctgggctacagagtgagactccatctcaaaaaaaaaaaaaaaagaacacagtcatgttggattagggcccaacctaatgacctcatcttcaccaattatatcttcaatgaccctagttccaaataaggccacattctgaggtattacaggttagaatttcaaaatatgaatttggggaggaaacaatatggttgtttgttcgtttgttttttaagcctgggtcttgctctgttgcccaggctagagtgcaatggcacaatcttgactcactgcagcctctgcctcccaggttcaagtgattctcctgccttagcctcccaagtagctgggattacatgagcgcgccagcacgcccagctaattttcatatttttagtagagacaggattttgtcatgctgtccaggatggtctcaaactcctgacctcaagtgatctgcccacctcagcctcgcaaagtgctggattacacacatgagccaccgcgtccagccaggaggaaacaatttaacacataacaatctcctgcgcggcttctcagacctcatcttactaaaaggcagactgattcagcaggtctgagtggggtgggacctattaatttgcatacctaacaacagcagcccaccctttgaattgcaaggaccaaacagacactcagtccatattcaaactttctccctcaactcaaagctgtccttgaaagctttattttttttttttcccttgagatggagtctcgctctgtcacccaggctggagtgcagtggtgcgatctcggctcactgcaagctccgcctcctgggttcatgccaatctcctgcctcagcctcccgagtagctgggactacaggcgcccgcaacca[138 bp omitted]cctggccccttgaaagcttttgattcaggatcaatgaaggatcacacattgcatttatggtcatgagtcttcggtaaacccaagagcttttagtcctaaagtgctttgtacatttcaaactgctatcctctaaacctcagagaggatttaatcctaaagtgctctagaatcccaacaggcattataatccctgaagtgctctattacctcccttttgaaagcccccaaacaaattttccaatcccaaagcattctgtaaacctcagagtatttttaatccttaagtgtaaacccaagtgctttgtaaacctcaaacagggcttttgaacccacaaagcatcctgtcatctgcaaagtgggctgaataggtcagtggggactgaccatcctggggtgctgtttggagtatgagagggtctccttgttcttcctccccaggtacccaggatggaggagaaggaggccctggtacccatccagaaggccacggacagcttccacacagaactccatccccgggtggccttctggatcattaagctgccacggcggaggtcccaccaggatgccctggagggcggccactggctcagcgagaagcgacaccgcctgcaggccatccgggatggactccgcaaggggacccacaaggacgtcctagaagaggggaccgagagctcctcccactccaggctgtccccccgaaagacccacttactgtacatcctcaggccctctcggcagctgtaggggtggggaccggggagcacctgcctgtagcccccatcagaccctgccccaagcaccatatggaaataaagttctttcttacatctaacaacaccatctcctttcactatttatccccaaccgcctgccaaccaggccatggcaaaggcccccagtcccagctctgagcatgagagctggctgtgctagctcttgcctaagtctcccaggcttggttttctcattcaggcattgtctgtgctgtagccccatctgtccactcagcacccaaccctgtcacctccagccctgtctgcactcccaactctcagctatttttttttgctttttttttttttttgagaacagggtcccactctgttacccaggctggagtgcagtggcacaatcacagctcactgcagccttgacctcccaggctcaggtgatcctctcacctcagcctccccagtagctgggaccacaggtgtgcgccaccacgcccagctaattgttgtattatttaacatagggatctccctgtgttgctcagggtggtcttgaactcctgggctcaagcgatcctcccacctcagcctctcaaagtgctgggattacaggcttgagccactgtgcccggcccccaactctttcactccagtcctctctacttggcccccgtactgttactgccataaaaatgggcacaaacttggcaacttaaaacaacacaaatgcattatttcacatatcatcctggtcagaaatccaggatggctccgctggccctcagctctgggtttcacagggtgtcagccacccgagctctcattgggaggctctgggaagaagctgctttcaagctcattcagattttaagcagaatcgagttcctgggcttgtgggactgaggtccccacgttcttgctggctgtcagctgggggccacccatgcttccacgcttagctccaagaggcctctctccagttactgcaggtggacctgacatcccagagccacagcccagtatcatggcgggactctgacttccccttgtgtcccatctctggtatgccttcctcttctggcagagacagtcctctgctttgaagggctcatgtgattggactggacctaccgggacaacatatttacagttttcaggaattatggggtgatcatctttgggggaccactatccagccccactcaggtccttcccatgtcatctccagcctcgactctgtggtgtccacacccacctatccttgtcttcatcttctcattctctcactaccccctgacggagagactccatctccaacttgctatttctctctctttgtccctctatctgaccctccctgctcaccacctcaaactccctcacttccaggcctgatgccacgtccaaacttggaagctcacagagcttgcctgtggtggtctgtccactttgtccttcctcagagcatttcctgtcccctctgagaatcctccgtcatgacccatcaaggagaaagctgatctgatcctccccagtgctgagtcccatctaggacccggacacggcatgtactctctcccttgaagcccaagctgagcgctggatcaccccatagactcacacactcaggaacccaacagtgagtacaatgaatacaagtcaacttttttttttttttttgagaccgtctcgctctgtcgtccaggctggagtgcagtggcatgatctcagctcactgcagtctctgccaccacccaagttcaagtgattctcatgcctcagcctcccaagtagctgggactacaggtgctcaccaccacgcccagctaatttttgtatttttaatagagatggggttttaccattttggccaggctagtttcaaactcccaacctcgggtgatctgcccgcctcagcctctcaaagtgctgggattacaggcatgagccaccacgcccggccaagtttggctgcttctaaggcctctctccttggcttgaggatggctgctttctcactgtatcctcacattgtgtctttttgttttttttgtttttgagacagagtctcacactctgtcgcccaggctggatggagtgcagtggcgtgatctccaccttccaagttcaagagattcttctgtctcagcctcccaagtagctgggactacatgcacgcgctgtcatgcctggctaatttttgtattttttagtagcgacagggtttcaccatattggccaggctggtcttgaactcctaacctcgtgatccacccacctcggcctcccaaagtgctgggatgacaggcgtgagccactgcacccggcccacattggcttttatttgcaattctagaatagggcagtacctcattctataaagtaaaatgagtgttcccatgagccgagcagagaagggttgtttacgatctcggctcactgcaatctctacctcccgggttcaagcgattctcctgcctcagcctcccgagtagctgggattaaaggctcctgctgccacacccagctaatttttgtattttttgtagagacggggtttcaccatgttggccaggtggtcttgaactactgacctcaagtgatccgcctacctcagcctcccaaagttctgggattacaggcgtgagccaccgcacccagctaatttttgtatttttagtagtgacagggtttcatcatg[133 bp omitted]tattacagaacaattattatctgtcatcaaactatcctttcagattcattttgaatacctcctttcttttttatttttctttgagatgggagtctcgctccgtcgcccaggttggagtgcagtggcgccacctcggctcactgcaatctttgcctcccgggttcaagtgattctcctgcctcagcctcctgactcactgggactacaggtgcctgccaccatgcccggctaattttttgtatttttagtagagacaaggttt[132 bp omitted]gtggccaggtgtggtggctcacgcctgtaccccagcactttagaaggctgacgcaggtggatcacctgaggtcaggtgttcaagactagcctggccaacacagtgaaaccacgtctctactaaaaatataaaaaattagccgggcatggcggtgggtgcctgtaatcccagctactcgggaggctgaggcagaagaattgcttgaacccaggaggcgaaggttgcagtgagccgagatcacaccactgcactccagcctgggcgacagagcaagactccgtctctaaaaacaaacaaaaaaacaaacaaagttactttacttgtaaaggttaaaacagaggggacttcctcatcatgctagctagaagatgtggctattatctctctctcctgtctcccctaaattctcagaggtcatataacttagtttcagcttgctgacatggaactgtaacatgagtgactccactggtctcttgggcctagtgcaggagctcggtccaaaccaatggcttcctgtaaaatttatttaacaaggcaaatctacagagacagaaagcagattcatggttatgtggggcttcacggaaaggaaggttgagttaggaataatggctaagagatgtagggctttgttttggagtgatgaaaatgttctaaaattaattgtgatgattgtagaactctgtgagtacactgaaaaccactgaattatacactttaaatgggtaaattatgtggtgtgtggatgataactcaataaagctgttaaaacaattagttaattaataattctattaaacagtttaccctgaacaactcagggcttaggggactaaccccctgtgaggtaaaaaatctgaagatcaattttgactccccaaaaacttaatgactaatagcatgctattgaccagaagctttacataaacagtagatgaacacatatattttatgatatatgtttttggggattttttttttttttgatacaggatcttgccctgtcacccagggtggagtgcagtggcacaatcatagctcactccaggctcgacccccctggttcaagcgatcccccctcctcagcctcccaggtaggcaggaccacagataaggctctcacaaccacacctggctaatttttgtatttttagtagagatgagggtttcaccatgttacccaggggtgtctccaattcctaggctcaagcgatcagcccaccttggcctcccaaagttctgggtttacaggcgtgagccaccatgcctggctgtgttatatgtattatatactatattcaaacaataaagtgagctagagaaaagaaaatgttattaaggaaatcagaggaagttaggagagggttaaaaaaaataaaatcgccgggcacggtggctcatgcctgtaaccccagcacttttagaggctgaggcgggaggaccacctgaggtcaggactttgagaccagcctgaccaacatagtgaaaccccatctccactaaaaatacaaaagttagctgggcatggtggtgcatgcctgtaatcccagctacgtgggattgttcaaggatgaactgtataagtcacaatggatctgcttctctgagcaaaccctaaaggataaagcattattcagcttgttgcagtctgccaatctaaaaagggtagtttcctgttgctttaattggaatgtttctggttactgatcttttgagctccttatcacatatttgttagttttttggatttccccttctgtaaattgcctgcttttctgtaaattcttggtcatttttttctgttgggttgttatctttttctttttgatttgtaggagttccttcaatcacctaccttttaatcccttgtcaattttatttttttattttatttattaattttttttgagacggagtctcactctgtcgcccaggctggagtgtagtggtgcgatctcagctcaccacaacctccacctcccagattcaagctattctcctgcctcagcatcccaagtagttgggattataggcatgctccatcacatctggctaatttttgtatttttagtacaaaaatacaaaatctcttggccaggccggtctcaaactcctgacctcaggtgatctgcctgccttggcctcccaaagtgctgggattacaggcatgagccaccacgcccagcccctggtcaattttagacaatgcaaatatcttccgctcgtccatcatctcatctctcatgatcttggcccttgggatccttgatgaatagaaacccttaatactgatgtaatcaaattaatttttttgacttatgattcatccttttgagatccctaaaagaagtcattaatactttcctacattttcttttattaactttatagttttaccttttgcatttagtgctttactagcagctggtctccactttacattattatgttatagaggaggaggggcctgaaagcctctcagtgctcaagatctttgaagacttaactgggcattagctcaattagagaggaagaaagcagtagaggatggggatggaccactatctcctgggcctcgcttcccccaagaaaatccatggacccacccacaaccactacatctcagactatttcagcatcttcctcccagtggcttcacacacctgggtgagacccccaacatctactcagttaccaggtctggtattccctgatatcatcctgattttttgactggaaaaaaagtgttaattcataagactttgggtttttttgggggggcaggggcaggcgatggagtctcactttgtcacccaggctggagtgtagtggtgtgatctcagctcactgcaacctctgcctcctgggctcaggtgatcctcccacctcagcctcctgagtagctgggaccacaagcatatgccaccatgcccggttaatttttataaattttttttgtagaaaggtggtttctccatgttacccaggctggtcttgagctcctgggctcaagcgatctgcctgcctcagcttcccaaagtcctgggattacaggcatgaaccaatgtgcccagacccccaacactattctaagcagtggggattaagcagtgaataaacaatgccccagcatcatgggatttggtgggggagagaaacaataaatatgtatcaagcaatggcaaatgctgtgaagaataaagcaacatgaggcagaaaggaaactctgaggggaccgagctcatcttagatagggtagtctctctgatatatacacagagggaggcactctgatatatacacagagactgaactggggtaatggagcaaatccggtccatggtaaatctggagaaagagactttcaggctgagggaatagcaagtgcaaaggtcctgaggttggaaatggcttggcttgatcaaaaacaaggaggccaaggtggacagagcagttattgatggagataaataggggataagatcacaaaagtagacgtagggtacaggagagcagaccatgcagggtctttggagcgtagtgaggagtttttatgttattctatttaaaatgggaagtgagctaagtgttacaattaaagaagtaacatatatgtatttactgatcaaaaagattatccggacttttgcttgtcactatgatggagtagctagtagctgactaactccccaccaaaaactataaaagctgaatacaagctaggcatgatggttcacacctgtaatcccaacactttggaaggctgaggcaggtggatcacctgaggtcaggagttcaagaccagtctggccaatatggtgaaaccttgtctctactaaaaatacaaaaattagttgggcatggtggcaggcacctgtaatcccagctactcgggagactgaggcataagagtcatttgaacacgggagatggggtttcaccatattagcaaggctgatcttgaactcctgaccttgtaatccacccgtcttggcctcccaaagtgctgggattacaggcatgagccatcgcgcccagccaaggaaattaaattctttccgagggaagataataccatccagtttttatattttaatttaaaaattaccagtcttgccaggaaacaagaccaaatgacagaaaaccaagagaaaaaacatacactagaagtatgtacccaaaggtgatccaggtattacagttctcagatacaggctttcaaataactataattaatatgttccccaaaaatagatgaaaagatggataatttcatcagagaactggaatctaaggaggagggagaatccaatataaattctagagctgaaaaataaattaattgaaataaaaattcagtagattagtcccacatcaggttagacacactggaaaacagatcaatagaaaatatctagattaaattacacagaaatagggtagaaaatacattaaaaacatatgagacatataggtcatggttaaaaggtctaatacatacatactggagtcctagaagagaggaaaaagacaatgaggaggaagcaatactaaagaactcctgggcaagaattttaaaaaactgatgaaagacatcaactcacagatccaaggtgggaggatcgcttgagcctgggaggtggaggttgcagtcagtcaagaatgtgccactgtactccagcctgcgtaacagagtgagaccctgtttccaaaaataaggcagaacgttgataattgctaaagctatgtgttaggtatatacgggttcgttatgtttactttatgtatgtttgagatttttttaatactgtataaagatatttttaagtaactgacactaaatactccaaataaaaggcacagattttctgatctacaactacatgcaacatggttgaatcttatatgacatttaacaaaagaaccagaaacaaaaatgtttctgtatggttttatttattctgaataaaaaaacaaataaagcttatctatgccattagaaattggggtaggccgggcacagtggctcatgcgtgtaatcccagcactttttgggaggctgaggtgggcagatcacctgaggtcaggagttcgagagcagcctggccaacatggtgaaacctcatctctactaaaaatacaaaaattagccagatacggtggcacatggctgtaatcccagctactcagaggctgaggcacgagaatcacttgaacccaggaggcggagtttgcagtaagacaagattgcgccactgcactccagcctgggccacagaaggagactttgtctcaaaaaaaaaaaaaaaaaaagaaagaaaaagaaaagaaattagggtaaaagttacccctaggagagtagggactggaaggagccatgaggaagaatcttggaggcaggtagtatgttgtatcttgatctcggtttagataacacagatgtgttcaatttctgaaaattcataaagcttatcacttatgatctatggactgttctatataaatattacacttcactaagagttttggtaaagtcaaaaatcagcagtcagcataaaacaaaacccaactatatgctgttacaagagacatgccttaaatataagcacacaaaaagatggaaagttacaggatgaaaaagataccctatataaacactaaccaaagaaagctggagaaatctctacatcaaagtagccattaaggcaaaaagcattgctagaagtaaaaaatgacatttcaaggtaataaaggggtcaagtcaccaggaggatataaccattctaaatctgtatgcatttaataatacagcttcaacatatataaagcaaaaatgacagaactgagagatggaaaaatccacagtcattcagtacaagaagcaaacagtgaagatattaaagatttgaacagcatgattgacaaacttgacctgacatagctgacctgcaggatacacactctgttcttttcttttttttttcttttttttttttttttgaaacagagtttcactcttgttgcccatgctggagtccagtggcacaatctcggctcattgcaacctctgcctcccaggttcaagcaattctcctgcctcagcctcctgagtagctgggaagacaggcgtgtaccaccatgcctgactaatttttttttatttttagtagagatggggtttcaccatg[137 bp omitted]ctgtctggcccaggctgtagtgcagtggcgcgatctcagctcactgtaccctccacctcctgggttcaagcaattctcctgcctcagcctcctgagtagctgggattacaggcacatgccaccacatctggctaattttgtatttttagtataaacgggctttcaccatgttggccaggctggtcttgaactcctgacctcaggtgatccacccaacttggccttccaaagtgctgggattacaggtatgagccaccacgccaagctactcttttcaaatacacatgaagcatttgctaaaatagatgaaatcgtggactataaagcaaatctcaacaaatgtcaaagaaatgaaatcatatagagtatgtttgtatgttttctgactacagtgaattaagtaggaagcaataataaaaagatagcagggggccgggcgcagtggctcacgcctgtaatctcagcactttgggaggc[137 bp omitted]ggctgaggcaggagaatcacttgaatccaggaggcagaggttgtagtgagcccagatcacgccactgcacccaacctggcgacaaagcgagactccgtctcaaaaataaataaataataaaaagatagcagggaagtcataaaatatttggaaagtaagcaatatatctctaaaaattatcactcaggtcaaattagaaaatattttgaattgataataatggaaacgtggccaggcatggtggctcatgccaataatcccagcactctgggaggctgaggcaggcagatcacttgaggtcgggagttcgagaccagcctagccaacatggagaaacccccatctctactaaagatacaaaaattagccaggtgtggtggtgcatgcctgtaatcccagctactcgggaggctgaggcaggagaatcatttgaacccaggaggcagagattgcagcgagccaagattgtgccattgcactccagcctgggtgacagatcgagactctgtctcaaaaaataataataataatagaaatgtggcataacaaatgtgtcaagtgtagctacagaagtttttagaaggcaaatgatggctctaaacgcatgtattagaagagatctttaaaaatcaaatgacctggctgggcacatgacctggcatcagcacggtggctcacgcctctaatcccagcactttaggaggccaaggcaggcggctcacccgaggtcaggagttcaagaccagtctggccaacatggtgaaaccccgactctactaaaaatacaaaaaattagccaggcatggtggggcacgcctgtaatcccagctactcagtaggttgaggcaggagaatcgcttgaactcgggaggcacaggttgcagtgagccaagaccgcaccactgcactccagcctgggtgacagtgaaactccgtctcaaaaaaaaaatcaatggcttaataacctaaaaatatcagtgacctaagcattcacctc[224 bp omitted]gaggcag[136 bp omitted]gggcttgagggcacatggctgtagtcccacctactcaggaggctgaggtgggaggattacttgagcccaggaggtggaggctgcagtgagctagggtcacattactgcactctatcctgggtgagaacctgtctcagaaagagaggaggggggaggggaggggaggaaggggagggaggaggggaggcagtggacgcggaggggaagggaggggaagggaggggaagggaggggaagggagggggaagggaggggaagggaggggagataaagggagggggaggggaagggaggtgggaggggagatgaggggaggaaagtggggggaggagaggagcagaggggaagagagggggaggggaggggaaggtacgggggaggggagatgaggggaggggagtgggggaaggggaggacaggagcagaagggaagggaggcgggaggggaggggaaggtacgggggaggggagatgaggggaggggagtgggggaaggggaggagaggagcagaggggaagggaggggggaaaagagagatggcacaaattattaatatccgtcaccacagatcttacagatattaaaaagattgggcatggtggctcatgccagtaaccccagcactttgggaggccaaggtaggaggatcatttgagggcaggagttcgagaccagcctaacataagaccgtgtttctccccctccaaaaaaagacaatattatgaactttatgcaaattatttgaaattttagataaaatggaaaaattccttgaaaaccacaacttaccaaaaccacaacttaccagaaataaaatagaacatctgaatagttgtatttttataaaagaaatagaatttgtaatttaaagtctttccacaaagaaaactctaggtccagatggctggtgacttcttccaaacacataaaaaataaataacatcaatcctacactagcactttcaaagaatagaaaaagagagaacacttctccacacattatatcagcatagccttgttaacaaaactcaacagggatctcacagaaaagaa[218 bp omitted]gaggcag[136 bp omitted]tctcagttcaattcccccttcctcagcccatttcaccaaagcctgaagcggaagagaaaaacacgagccccagcatggcgggcgcagccaccccctccttccaccaccagacaaactccgtggccacagcccacaccgccagcgcgcatgcgtgacacgcgtcggccgccggtttgcacctgcgtcttaagaggagtccgggcggggaggggcggggctcagacgctgcgcacgcgcactcgcgacccctcgcctccttttgctttttctggcgggaaaagctcacgcgcacctcccccaactcaactgccgttcgtcgttcgtggatgtccgttgtgtcccgagactaggacgtggctccaggtgcgccctgccccgcggcgaggttcccagaatggcccttcccagcccctaccgaaatcctagcgaagcccccccatattgtgggagagatacccctgcgtcagggccccccagatcctgaccacttgggag[133 bp omitted]ggggcaggagaactgcttgaacctggaaggcagaggttgcagtgagctgagatcgcgccactgcactccagcctgggtgacaagagtgagactccgtctcaaaaaaaaaaaaaaaaatcctgaccacatcccctcagatatactgaaaggagtccaccaggaaatcttatagttgacccccgaaatcctgtcagaatcgtctagaaattgtcagacttctccctcagagcctgccagaaactttccccaaaatcctattactctccccagatcagcagagccacctagactcgtgtcagagatccccagaaatcctggcaggtcccctcccaaacccagtcggacctcagattccgtcagagagcacagaagtccatcaaagacaccccagaaacggagaccccgaaatgcactcagagacccccgcagaaatcaagaccctccaaatccagccagagacccccagaaatccagtcagacccctgcagaaatcaagacccccaaaatccagccagagacccccagaaatccagagacccccgcataaatcaagacccccaaaatccagagaccccgaataaatcaagacccccaaaatccagtcagagaacccccagaaatccaatcagacccccgcagaaatcaagacccccgaaatccagccagagacccctgaaatccagtcagagacccccacagaaatcaaaatctccaaaatccagccagacactccccagaaatccagtcagagacccccccaaaatcctgtcagagcccttgaaagcccgccaaggcccacaccacccagagctcctgccagggccccatcctgcttcagtgtccccgtctcagtcccgtcagacccccgagatcaaccaacacccccggggtccctcaggactccatcccgaacccactccgtgcgccagggcccagccaaggccatcgcccccctttgcaccctgcagggtgttccagaccctggaagggcctctcttcaaagacccgtgtttccagaacggtggcagcgggctcacgtggcttggggagagcaggcactgggggagctgggtgaggacaggcgagcccaggctcgactggtggccccaaggggcgcccgtgcccgctgtgatgatagcagcgcccaggtctctctctagcccccagagtgcggccactaaggttttgggtcggcctgggtggaatggaggcaggatggggccccccaaactcctgtcactgctgcagggactgcccagagcagctgcaagtggggctggcagggatgaggaggaggtggcctgggcttgggggaccatgtacatcctgagttggaacccaggggagcagcaggtttggggccatgatgaggagagacctaggggttgcccgacggagagaaaagggacaggaagaggcaggagcttcagagactactcaatgccactctagcctgagggactggaacttagtccgggggcattagggagccatgggaggatcaggagcaggggcaagtcaggatcaaactcccatgagaagccagccggccaaatccaggctgatgtggcaagaatggcagctgcccagggctgtgtgggagccagacacggcccctcgcttcccggaagaggccacgtgaagccgaagcaggatgcaggagggcgtcccaggcagagacctgggcatgggagcggtccgcagctcagagtggctggagcatcatgtgcgatttggggtgctgaggtgggcggtcagccatgcagggccttggcgtcagggccagggtctcacccgtacccaggattcagggagccatggaagggtacttagcaggggaggggcaggtcagctctggggccctgtggggacagactggaggacaagcctggggataggaggctgggacaaaggccagggaagaggaccaggcagcctggaccggcggcaagccatgtgaagaaagggaggcagtgacctcccccacccacccactagcccctttgatgtcagccacctcgttctccagcccacacctccaatccataaaacaggtcagagcggagctgctcaggtcacagcgggggtgacaaacaggttgtgaggacccagaggtcctggggcacaggtggggctaggcaggccccgacccttggtggctgctctgaggacaccatttcctgcttctccttccaggagtgctcgggccagctggtccttttcccatccctccccatgaaggagggaggctggtagctttgccagcagctgcgccgcggcaggggtggcccatggacctgcccgagggcccggtgggtggccccactgcggaaagtaagtggctggaaccctatttgccccggggagggtgaggagggagccatgggtgaatgggtgccaggctgtgactcggggacttgggagaggtggctgggggtggctgagcctttgcatgggtgcagagtggaagggagggaagggactctggtagattaagtgcctactctatgcccgcccacctgtcactaccccttatctcctgtggggaggctggactgtgtgagagcgcaagcagccgcaccccttactccattcagatcgcggcccagatggcacttcttactttatgtaaagcagctgccctgtgacactctctcccctgccccgcttcatttctcttcacagtgctcacatctgtatgtcatgttttgtctctgtctcccctgctagagcatgagctccacaaggcagcgtctgttttattcactctggtattcccagtccctagagcagcgctgtcctgtggaagtataatatgagccacataggtaatttattattttttaaaagaaaaaaggaacaggtgaaatgaatgttgataatggattttccttatatagccagactaataccctgtatattatatatgtatacaggatatacatacatagagatatatatatgtatatagccaatatatagccaatataaaaaatgtatccagataatctgtttttttcatactaagccctaaagatctagcgtgtactttacactaacagagcatttcagtctacactcgcctcagttcaggtgctccagaaggagagactgccctgttggctgggaccccagagcaactcctgactcactgtgggagctcacttactgttgagtgaacggacggatgtaggttgaacgggtgtgaaagctggcttcagagggtggggaggaggcactggggttgcctctctgaaactcatctgccaagtgagagagcccagtctgatggggatggtagggcccctttcttagaggctcccaggcatccacggcacagcctgcgtctttttctacaaagccccagacctcaggaggctttccagataggagggtcagaggtagacaccagggtgtgggaaccagaggacaggctgtctagtgacagccatctaaacttcacctgcaccagcagagggcgtgcagccaccaggatccgggtggcaagggctgagacagcttcgagaggctctggaaggaaaggtaggaacacacccagaaggagagatggagacagaggaaggcaaagggaaaaagaaacagcagaggaaggaaagagaagacttagggaatggagagtctctgagatatgggaagggaagcacagagactgagatacagggaagaaaacggggacaagcgacatggaggcagagagacaggacgtggggaagagagactgggagaaagatagagagaaagagccaaagagaaatgtaacgaagaggcaaggacagagacatagaggagatagagacactgaggaaggagatcttcctgaggaacagaaatgacatctccctgggggaatcctgggatgcgacttcagacacatgctgatcctcagagccagcacgacctgatgccagtcctgagttctattcccagcttagctctctctggcaagcagccctgggtgaaccatctcattgggcctcagggtcctcgttcatgtaacatgagaaagacactgagagggctgggtatggtggctcacacctgtaatcccagcactttgcgaggccaaggtgggcggatcacttgaggtcaggagttcgagaccagccttgccaacagggtgaaaccccatctctactaaaaatacaaaaattagctgggcctggtagcaggcacctgtaatcccagctactcgggaggctgacgcaggagaattgcttgaaccttggaggcagaagttgcagtgagcggagatcacgctactgcactccagcctgggtgacacagcgagactccatctcaaaaaaaaaaaaaacagtgagaggaggaaaacagactggggctaaagccctggtctccccctaactgtgagtccacacgccccttcccaagggccaaacctaggagcataggttcaagacagagggggtgcaaatttcactcactgcagagaatcctggaagagttagagggatgagaaagttgactcatatgttaaacagggtgacctttggcgagttcttagtttctctatgccttagtcccctcatttgtaaagtagggattataatagcatcgattattattatgctagtagacagttcatgtaaagtgctcagaaaaggcctggcacctactaaatgctcaataagtgttcaattctattcttgagtccccaccacgtgccaggccttctgccaaagcctttctagattgtatctcattttctctctaggaaagaggtaacaccaaccccattttccagaggaagaaactgaggcccaagagaagttgagtccattgccccaggtgccaccacttgtctgaggccaagcctcggttgccccctggatctaccccgtcctgcagcctgtgctcagtgagctgctgcacccagctgttcaaggccagggcagggagcctagaagttcacttccagccctgggagagaggctgggccagcccagtggctcctgcagttgaggatctcttcctatgtcatggagcatttgttgagcacctgccatctgcaggtgttgtggctacaacagtagacaaatagaccccaggacgtgtgtgtgtgtgtgtgtgtgtgtgtgtgtgtgtgtgtacatgcgtgtgcttcacatacacagagctaactcagccctggtgaggaggatcactctacccacccccccagtagggaaaccgaggctctaacagaagagacttgcccacagatgtgcagctggactctgcacccaggtctgacacactgatccagctcataaccattccctcactgcccaccctgtctggtttaccctatcccttcatgtctcagcccctggccatgggctccaatgatgccacccttgccttagggatgcagggaggagagagacctggtccccagggtgggctgggagaccggagatgcagcaggcgggatcgatctgggctgcccatgcattattggattgttcctggctcctgggcccccccttcactctcagctcctcccagaatcctctcttctttgccctccccgaccctgtccctctctgagtccagcctgggaggctggagaggagaggaggaaagggtgatctcagagcgttcttctctgggctcctaagccaattggacacaaaaagacagcaggggggacttcctggtttgaaagatggggggaagtaactcagagaccctcacattgttgccccctcctgaagcttcctgctgttccccacccgcccgaactctcagtgctctgagtgaattccctccccgctacagagcccaggaggctgaggacctggggtcacccctcttccttccttattcttcccactggtgagctgagccctcttgtctccccagtgtacctccgggagcggcctgaggaggcaaggctgggaatgccggtcagcttggaggagcaaatactcaactccacgttcgaagcttgtgaccctcagaggacaggtggtgggggcatgaggggtgctggggaccagtgcgggcaggatggggtggaggctgggaactggggagcctcagagagaagactgggctaaggccccctcttgggggtattgtaagaacaaagtgggtgattatgggaagcttcaggaagaagaacgtggataatggggtgaaggccttttagaatgaggaaaacttgggggacgttgatggaagagggcagagttttggggtcgtgggataggggagggaggcagccaccatggtggcgtggggcatggctgatgctgtccctatgtccatcccctttggtttaccctgtgatggggggatgactgggccccatttccaggtgaaaaagtggactcagaggaggggaaagggcttgcccagtgtgtctccactgggccatggagcaggagtgccaccagcctagccagtgacatcctggtcccaagctgctgccagtccatacccatcactccccacctgccccagaccccctcactgcatgctctgtcacaggcactgtggctgtggcccaggtgctggcctacctggaggctgtgacaggccagggcccccaggatgcacgcctccaaacattggccaacagcctggaccccaatggggagggccctaaggccactgtggacttggacactttcctggttgtcatgcgtgactggattgctgcctgtcaactacatgggtgagtccccacatcttcatcctcctctgggaagtccttcctaagatctaacctcatacctgcttactggagccagcatcctttaggcccaaggacctactgtgtttggaatgaggctgtggagagaaaaatgaagagacgggattcagagggggtagatagggagtctgaggacaaaataatttggatgaggaagcagagggggtctgggagacagaaataaaatggggctggagaagggaggagtttggggctgacagaggtccctccccaacccttcaccaaacccactccttgcccctcctgcttttccatctggccacgggcacttgccatctggcctcaccctcctaccctgtggtgccagctctcacctgacccggtcccctcctcccacctgcaatccccctgcctgtggctggtgaggactgaggggcagctacagtggggcgctaagcctcatccctttgatacaggggattagagctggaagaggagaccgccttccagggagccctgacctcccggcaactgccatctggtgagattgctatatatagaatgaagcaggcaggccctgggtcagacagtgtggggacttaccacccagggcagagcaagggatagggtaggaaccagggacctttactgtagactagagctgtgagtgtggctttctaggtcctccgtcccttccttccgtgagctttgggtttcttttcttcagagggtggtttccaactcgttctcctcacaccagccctattagagaggcctacgaggccccgcctacctctgctccatcattaacatcacctctcctcactctagtccaggaattcacaggcccactggtcttgctgcccttcctcgaatgtgccccacttctgcccagcacaggtccttgctcaggctgttcccctccactccttgctccccaccctgctggactttttttttttttttttttttttttttgagataagagtttcactcctgttgcccaggctgttgtgcaatggcgcaatctcagctcaccgccacccccgcctcctgggttcaagcagttcttctgcctcagccttccgcatagctgggattacaggcatgcaccaccacgcccagctaattttgtatttttcatagagacgaggtttctccat[137 bp omitted]ccctggctagagttccttgctccccatgctcactcctagacttgtaggcctttccattggaacatccacctgcagaggaaatctgattatctagttagccactggcacctgggtttagttggctggtttgctcaccattgtatccccaggacctcacacataggaggtgctccataaaaaaagtggtcatgattacaggcgtgagcctgtaatcccagcattttagaaggccaaagtggaaagaacatttgagcccagtagtttgagaccagcctgggcaacatagtgagacaccatctctactaaaaataaaaaattagctgagtgcggtggcatgtacctgtggtcctagccgggacactgagtcaggaggatcgcttgagcctgaaaggtcaaagctgcagtgagccatgcattgcaccactgcactccagcctgggcaatagagcaggatcctgtcttttaaaaaaaaaaaaaaaaaatggtggtcatgttccatttctctagccatacaaaaaacggtggggaaggaagttctcttcaacctccttcatcaggcttgggggcccagggagggctgcaagcagaggagggactagaggccagaaggccagagaagaggctctggtgaggatccaagaggagaaagcaagggccggggcatggagacagagaggaggggtggagcagagagtcaggggcaggagggagaagtctgggctctgctggactgggggtgacagggagcaagggagccaggtccgcccagtggctgagtggtcggtgggggatctgggaaggggaaggtgaagtgctgcccagtgttgggtgtaaagaatgtggggagttagggttatctgggagatccagcctgagctcaaggtagaagacaagcaagagggctttacagtgggtataactgcagccccaaaagcccatgagattctccagagcacaggtgagggtggaggcagatggagtccaacctcagagccctggggcactttacgtttaagggttccagggaagccaacattctcttggctctctccctccaggatgcccagaagctgaggagccagccaacctggagagcttcggaggcgaagaccccagacccgagctgtacctatcctcacacccctccctgaccctcctgcccacaccctgtcccctccagcctgccgaggcccgggtagggcttgggatccttcagggaaatgaatgagggacggggctttgctgaaagttcagggagagcagaggagtctctctcctgtttatctttccccaaaagagccacatctccccaccaccagcacctacctcgacccggggaaatgagtcaggggctgtggacagtgacctgaaccccttccttgcccctagacaagccacagctgacctgctgagcagcctggaggacctggagctcagcaaccgacgtctggttggggagaatgccaaattgcagcggagcatggagacagctgaggaggggtcagcacgccttggggaggagatcttggctctgcgtaagcagcttcacaggtgggctggatgccacacccaccctccccagcgcccctgcctccgtcctccctgcagcagccggcctctatctcccatgctcgtgtctgcatcctgctctttgactctgtacctgtcctttcttttcccttttctgtttttatcttttgtgtctctctgattcttatctctcagcctctgttttggtctttttatctttcccttgagggttcagacttctctctctctcttttttttttttttgagacaggttctcactctgtcacccaggctggagtgcagtgggggtgatcacagctcactgtaccctccgcctctgggctctagcgagcctcccacctcagcttcccaagtagctgggaccacaggcccaccaccctgcttggctaattttgttttattttttatagaaatgagttctcactgtgttgcccatgctggtctcaaactcctgggctcaagccatcctcccgccttatcctcccaaagtgctgggagtacaggcctgagccactgcacccagcctagatttctctctttattctttaactctctgattcttcatgtcactcgccctttcatctctctgtgctttgtcattcttcatgtttatcgtggtctccctgttctagtcccccactctctctaggtctctttcccacttcctcagtcttttaggttaaaactgggtctctgtgcccacaccaggtctccttctcctcttttctctctgggtctctgtcctcccctctctctgggtctctgtccctgcctaccacctgggatctctctgttgctagtgtctctcagaatggatctgtctctgtgcttctctgccttcctccctctcgtatggctcatctgcccccacccgcattcagcacccagcaggccctgcagtttgccaaggccatggatgaggagctggaggacctgaagactctggccaggagcctggaggaacagaatcgcagccttctggcccaagcccggcaggcggtgggtctggcccaggggaaggaaggtgccctctctcttctttgtttcctggagtcagggcggcagagtgtgactatggagtaggaaggggcagaggtcacctggctttctccctctctccaggccctgctcaccctagactttttcaagcttacctgccatccttctcatgacaaaggagacagcaggagccatcagggcttcccagacccattcccccaggccctggttgtgttttcaggggtgggagaagggcaacatgggggcaaggaggctagaaatgaaacctttgtcctctctctggggttggtcaggaaaaggagcagcagcatctggtggctgagatggagactctgcaggaggaggtgagcggaggcccagcaccacccccaccccttccccagtccttaaggtcttcttgacaccactcccttctgcccccaacaccccagcagcctgtcttggggagacctcagaatgtcagtagtgtgggaatgtccctgaggttatatcacactgtgagaacagccgtggtttacaagagtgtgaggcatggggtcagcctacatggcttcaggctgaggccacctacataagagtggaccagtgcctcccttctctgtgcctcagttgcctcacctataaagatgaacaaaacaatggcatctgcctcagtggtttgtgtgagacttcaaccgaaggatacttgcaaagtcttgggcacaaggtaggacacataggatgtgctcactaaaagttatctagcattgtttctatattagtattttttacagtgaataaaacagccaggcacagtggctcatgcctggaatcccagcacttcgggaggcctagctgggtggacccctttagcctaggagttcgagaccatcccgggcaacatggcaaaaccttgcctctacaaaaaatagaaaaataagccaggcatggtagtgtgcacctgtagtccagccactcaggaggctgaggtggaaagactgcacgagcccgggagacagaggttgcagtgagccaagattgcatcatggcattccagcctggatgacagagcgagagcctctcaaaaaaaaaaaaaaaaaaaaaattggatttgaagtcaaccttgagttcaaatcccatctccgccacttacacaataggcaacctttaagcatgtgacttctccttctcaagcctttacttttagtttcttttttttttttttcttttttttttttttgagacagagtttcattcttgttgcccaggctggagtggaatggcgcgatcttacctcatggcaaccaccgtctcccggttcaagtgattcttctgcctcagcctcccaagtagctgggattacaggcatgtgccaccacacctggctaattttgtttttttgttggttggttggtttgtttgttttagtagagacggggtttttccatgttggtcaggctggtctcaaactcccgacctcaggtgatctgcccacctcagcctcccaaaatgctgggattacagacatgagccaccacacctgacctacttttattttcaaagaactggaagaagggtatctgttcagtaggcttgttttgaggattgacagcatttcactgagggactagcaaacaatatgaagagactgagttcagcttcacatttaattcaagccccgttccatccaagacagaaaaacatcatcttagttcattctgggcccacctaattttttttagattgaaacaaactcatcaattgacaatgaaacctgtcaccacccccgacctcaaggtggtatctaagttgcaggagactgatgcaggagcctagtgctctaggaggctgctgatcctcactcaatgtttctcctctctgctgttcatgagattgatgggttttgtccaagcgtttgtcaccactgtgtgctggcatctactgtgaggcccgcattgcctttggatctctggacataccatcttcttcatcttctggtggtgatcccttatctgggctgggactcttactccaccacttccacacccttccagagccagggaggtgatttggctactttcctgtgaaagggaagaggctggggtcactgcccaaagcccctgcctcatttccccaggccagggtgggtgctcatggtggggagatgtggcttctctggggaaagagaaacaggagagagattcctctgttctccctgagctgttagcaaagtccctgtccgtcactcatttccctgaaggatcccaaaccccacccaggccttgacagactggaggacacagggctggggtgggcagaggtctggagaggacccaccagtgaggcctctttgctttcacaagaaagtagcatctctattattctcacaccgtgatgattctgagagtgctctgggaagtacacgcaaggcctctcagatcacaagacttccagggctctgcggttctccatccataccctccacccctcatagctagccctgggttaggggaaaactctgggctcattttcagcctattctcttctctgtctgtcctgcattcctcccccagctctaaggatctctgcctagtccagacagatcatgtattcccaaaaaatatctttgtcctacatgtgcagtgttttttacactgaaatccaaaatctttctgctattttctggctcttccatgaaaactcacccccttggggcaatgggaatctcacagcaggatggctgtaccatgtgagacatggaatgcagcaggatgtgac[141 bp omitted]tgaagccccatctctactaaaaataaaaaaatcagccgggtgtggtggcacacacctgtaatcccagctactcgggaggctgaggcaggagaatcgcttgaacccaggaggcagaggttgcagtgagccaagatggtaccagtgtactccagtctgggcgacagagcaagactcagtctcaaaaaaaaaaggaaaagaaaaactttccggctgggcatggtggctcacacctgtaatcccaacactttgggaggccaaagcaagattgcctaggccaggagttcgagaccaacctaggcaacatagtgagagcccgtctctataaaacaaaaaaaaacaaaaaaagtaaataaaagaatgaaaggccaggcacagtggctcacgcttgtaatcccagcatcttgggaggccgagatgggtggatcatttgaggtcaggagttcgaaaccagcctgaccaacatggtgaaaccccacctctactaaaaatataaaaattagccaggcgtggtggcaggcgtctgtaatcccagctacttgagaggctgaggcaggagaatcacttgaacccaggaggcagaggttgcagcgagctgagattgtgccaccgcattctagcctgggtgacagagcgagactctgtctcaaaaaaaatttttaaaaatgaaaaactttccctgaagccccctggcagaacttcctgccttacagttcattgccattcagccattataaccagactacatggataatatggccactaatgggtccagaacgctccagggaagagaacaaagaaatgatgacttcaatctacacgacattcatttccttaaccagaggtttagaagaaggtggtctctgggaagaaggtggtctctgggaagaaggtggtctctgggaggtttggtggctccctggctgcctgtggcctcattattgcagatgactgcaacagcttcaatctcatgttctcattcaaagtaggaaaacgtggggcaaaggggagccatgaggctgggcgcggtggctcacacctgtaatcccagcactgtgggaggccgaggcgggcagatcacaaggtcaggagatcgagactatcctggctaacatggtgaaacccccgtctctactaaaaatacaaaaaataaataaataaataattagttgggcatggcggcgggccgctatagtcccagctactctggaggctgaggcaggagaatgtcgtgaacccaggaggcggagcttgcagtgagccgagattgtgccactgcactcagcttgggcgacagagcaagactctgtctcaaaataaaaaaaaagggggggggcagccaggaaatgcccctctcgtggctcctttcatcagaagcctctcaccccacccccagcagctcttacatctcactggccagaactggctgacataacgcccccagctgcaaaggagcccaggagaatatgtgacctttttcagcctctagagtggcaggtgaacaagtgagaaggggtgagaatggctgctggcttagctaaccagctgagcttcctgcatctgccaagatttccaccttgactcactcccatggctggggctgggacccatctgccctcagacagagagagtagatccctcgacaaaagcagaaggagtaagcagggtaaatagcaaccagcagtctcatctctacctcctccccaccaggaaggcctgctgccaggttgagtgccttgagcagcatctgggacaccctcggccctcgataaactggagctattcttggttccctcccctctaccttccccctccacacagctgcctacagagcatctatagattgagttctcaagttacagtagaataatgctggagtaacaagacactcagacactgaagatccaggcagccttcctgtggagaacctacagagctgtctcaggttactgcagaaggaggcaggagcagctgagtaaccaggttccctgccgagtggcccaggatctggcctgcaaatccctaccaggtggacagatgttgagacagcactcctttcccgtccttcctctgcccttcacctggcagcccaggcccactgagacagagggagagcagctgatggaggacttggagctggctggagggagggagaggctggccttggtgtatcccctggagtgccaagaggaggggcgtggtgaaagggaactctggactgcctccatgccccaaagtgcatttccccagtgaccacctcgctttgaaaccctgtgcaacttgataggtttttggtgcccctaaactttagactggaatctgggccattttatgttcaggtcccatttcatggctggcatgggctgccctctccggcctattgttttcccagctaactgccctcagccttgaagactcagcaacgcctcctcaggaagcctgttagtgctcccatggtacccaggctgtaggcctcaccagagcccacctcgtgcattgttacccgcttctgcatccatcgccacctctagagcctaattccctttgtgtcccattctcacccagggctgtgtctggctcacatgagagtctgaggattataaacagaatttggaatcacacagatttaggtttgagtccatttaccatgtgaccttgccaagtctcttagcctctctactcctttataaaattggaaatgattatactattaatagggcaaccagacttggcattactcctgaatggcacaatttgatatgtatagcaccacccaatcttgccaagaaattgaacaacagtctggacaaggccctggatctacctaccagtttataagaaataatgatagaggaaagtggtgaacataaccacagggaacaagagcgcaatcagcctaatctgaacgcaccaatcctacaggacaagggacctgctttcttccacagaatgagggcctgaagagtaccagggtcggggtggagggggcagaaattactgtcagattaaaagaagtaagacatttcaaccaaaagcaatgatggaccttgtttggaccctcaatcaaagtaaatgtaaagaaatctctgagacaaccaaaatgaaaaaggagcacaggcccggtgcagtggctcacccctgtaatcccagcactttgggagacc[135 bp omitted]gaggcaggagaatcgcttgaacctggaaggcggaggttgcagtgagccgagatcacgccattgcactccagcctgggcaacaagagtgaaactcctctcaaaaaaaaaaaaaaaaaagaaagaaaaaggagcacaaactttctagtatgagatgatactgagttattgttaattttgttaagtatgatagtggtattgtggttttgctaaaggaaataagtcctcaagtaggagataaatgctggagtaactacaggtgaactaatatgatgcctgcaatttgctttaaagtaatctacttaaaacatctggaggagagccgggtgcggtggctcacacctgtagtcccagcactttgggaggtggag[131 bp omitted]gaggcaggagaataacttgaacccgggaggcagaggttgcagtgaaccaagatcatgccattgcattccagcctgggcaacatgagggaaactccgtctcaaaaaaaaaaaaaaaaaaaaaattagctgggtgttgtggcaggtggctgtaatcccagctactagggaggctgaggcaagagaatcacttgaacccagaaggcaaagattgcagtgaaccaagatcgcaccattgcatgccagcctgggcaacaaaagcaaaactctggctcaaaaaaaaaaaaaaaaaatctggaggagaaacatctcagtttaaacaaaaccgagaaaatgcatataattattgaagctgggtgatagataatgtggataacaggctgcttatattgttcttttgattttaaaattggggataagaaatgagtcaacacatgcaaaatgctcagtaagtgttagcgattattaacctatctaatctttacagcaatcccataa[135 bp omitted]ctgcctcagcctcctgagtagctgggattacaggcacgcactaccatgcccagctaatttttttatttttagtagagacggggtttcacca[136 bp omitted]aattaaagctgtggtcccactggaatggttggaggaattaaatgggttaaaacatatgaagtgcttagcatgaggcctgatgtatatcaatcaagtgtttagcaaatatctgctgttaattttgacattaccacttgctggaatgaacgtgaccagccattccttcttctagaacgggaagctgcttgccgagcgggatggagtgaaaaagagaagtcaggagctggccatggagaaggacactttgaaggtgccactccttcctagtgcctgacaactttccaccaccccggggccatttttcccatttccggttttagtgactgcagcctgataagggcagggtcttccatcaagctgtcaggctcccaggaccacccaggcatccctaaaatccctgaagtcctggaacatctcaggaggctgaatacgtgggggtgcgagagaacaggtggggccaggtggagggcaggaccaaggggagtcctgggaggctggatggatggaccggctcctttcttggcagcggcagctctttgagtgtgaacacctcatttgccaaagagacaccatcctctctgaggtaaggggccccgggagggaaagagattcgctttccatgtgcaccagccacttcctgcccctggtctagaaagggaagtcctacttgggtctgatccttggatgtgcagctggagagactggagggtttccccaggtcccaagtgtgacccctcagggatctagaagcccttctgcccggtgctctcccttgtgccccagctcttccctcaagctcaccctgtcccttaaccccccagccagtccccccgccaccaccacccccagtgtctttggggaactggtcccagtctcatttggctttcggctttcctagcgcactcgcgatgtggagagcctggcccagaccctggaagaatacagagtgacgacgcaggtaactcagcggccctcgccacccaccgcggccctcgccacttctcttttgccatctctgggacttgctgcctctcctcctcgtgcctctttgtcagtggccacatcttgcttcttccatccttgatgtatgactgtatgactgcatgtctccccctctgtttctgtatctgccttttcactttttctctgttccttccattcactttcattctctgtgggtgtcttctcacacacctcctctccttatcttattttttttttgagacggagtcttgctctgtcgctaggctggagtgcagtggcacaatctcggctcactgcaacctctgcctcccaggttcaagcgattgtcctgcctcagcttcccaaatagctgggactacaggtgcatgccagcatgcccagctaatttttgtgtttttagtagagacggggtttcaccatgttggccaggatggtcttgatctcttgacctcgtaatccacccctcttggcctcccaaagtgctgggattacagacgtgagccaccacacccagcctcccctccttatctttatgtgtctctgcgaggctcgtgtgggttcctgtctctgcctctaggtctaggctgtctgtctccctaggcaagtcttctctgtttggctctggtctttaccagtctcttagccctcatgtttctcttgcctgtctgtgagtctgtttccatctatgtctcattttttcatgcatctctgcctctgccttccttcttttaattgtcttggctgtgctttttttttttctttcttttttgagatggagtctggctgtgtcacccaggctggagtgcagtggtgcaatctcggctcactgcaacctccacctcctgggttcaagcgattctcctgcctcagcctcccaagtagctgggactacaagcgtgtgccaccatgcccggctaattttttgtatttttagtagagacatggtttcaccctgtcagccaggatggtctcgatctcctgaccttgtgatctgcccgcctgggcctcctgaagtgctgggattacaggcatgagccactgcgcctggcctcttggcctgtgctttagcttctggattcctgttgctctctctctttggcttcctaacattctgtcatggctttcttccccttgtccctaggcagtatgtgtctggggagcccaaagtagtcaggaaaggggaaagaaccctggaagaggagcccagaggtggatgggagggtgggaaaaatgcagagccaaatgtgctccccacttcctcctttgcaggaactgaggctggagatttcacgcctggaggagcagctgagtcagacctatgaggggcccgatgagtgagtggaatttcaaggggtaggaggaggcaggaggggagcctaagggcagggacaccctggcctccagccccaaggtgggcagggaagggaggccagcatgagctgactgagtggccaccaggcacagaggccatcttcctccctccttcctgtgtggccaggctacctgaaggggcccagctgagaagagtgggctggaccgagctgctacccccatcgctgggcttggagatcgaggccattcgacaggtgggcctaacacccctggaataagctgcaggccaccaaggcagaatctccaaacatctccctactctgatcctcacaccagcctagccctaacccacattgctgccagaggctcctatcgcaaccttagcttttctctaactctctctacctcggatcctaaccccaaacccactgccagacccaggcctgtgccagaccccagtctgatccagctttgactcacccctatctcgtctccctccatgaccatctcactccttaacttcatctcgaacctagaccttggtcctggcaccaaatcctcccctgttcctgcttctgcccactccccaaccccagccccacaccagcccttttctatctctcatcctattttcagccgcacacctaaacctatttctatctctgaccttgttttctaccttaatatggctctccctgacctcggaaacaacttctgtcccagaaacaggaagtggcaactgctgatctctccaaccctctgtgtggggtgtggcagtgggaggaagtcatccatgagaccagtgaggaaactgagtttccatctgaagccccagctgggggacaggtgagcacaggaaaagctctgaagtccaggagctggaaaggggccaggagctccaggtgccgccctggccagcccattcactcacacttttgcttgttccccatttgatgagaaaatgttaattgagggcccagtgtgtgctggacacccagccacaagccagaccagacaccacccctaccccagggactgacctgccagcgttgtagacaaaggtgaaccaagcaaacacacaagttgcactgtggcttttattgttggtttgttttttagaaaacactcttgggaattacattatttaaaatcgtactactgtaggaagggaataagtaagttgtttattccagcattttaaggatatattaagcatttatgtttcaaatgttagcacctttaagaaaagccagcaagctcactatgacatctttaactcagcaataaccattggggttttttttgttttttgtttttagagacaggatcttgtcttattctgttgccaaggctggagtgaacttgactcactgcagcctcaatctcctggataagcaatcctcccacctcagcctcccaagtagctgggattacaggaacacaccaccatgactggctttttttttttttttgagatggagtctcactctgtcacccaggctggagtgcagtggcacgatctcagctcactgcaacctccacctcccaggttcaagcagttctccctgcctcagcctcccaagcagctgggattacaggaacctgctgccacacctggctaatttttgtattttttttagtagagacggggtttcgccatgttggccaggctggtcttgaactcctgatcttaggtgatctgcccgcctcggcctccgaaagtgctgggattacaggcatgagccaccatgcccagcctttttaaaatttttttatagagttgagatctcactgtgttgtccagactggtctcaaactcctgggctcaaactgtcctcctacctcagcctcccaaagtgctgggattacaagcatgagccactgcacctggcttttttttttttaattaattaatttattttgagacggtctcactcgcttctctgttgccccggctggggtgcagtggcattatcacagctcactgcagcctcaatctccctggactcaggtgatcctcccatctcagcctcccaagtagctgcaaccacaggcatgtgccaccatgtgtagctaaattttctattttttgtagaaatgaggtctccctgtgttgcccagtctggctgaactcctggggtcaagtgatccgcctacctcagtctcctagagtgctgggattacaggcatgagccactgctctgggctctctctctattttttttttttcttttaaagaaaatgttgtaaacagctctataaacaagctgtattgtcttgagaactgcaccacttcaaagctctttgccatccttaaggagagactcatttctctgatcactttttccctggtttgagaaaagcttttgtttctctttgacaccagagcttgtttgggttctcatttaactctcccagtatctctgtaaggcaggcatcctcatcttgttactcatgggaaactgaggctcagggagaaatcacatgccaatggtcacacagcttgttggggacagagcctcatccctcagaagtgtaggttagattgggcttctgctttgagctgtcagatgcccctgagagacaggcttgtcaaggggaagactgagccaggcctcagagtgcaacctgcgatgggcccagggatacagagctgagtcccttggggccgggcctctcagtgctcaaggcctgataggagagaccctgcaaatgggttgccccagtgcagaatgatcattgtgctagaggtgggggatgggcctgtgggagcccagagaaggggtatctgtgtcaggtcagagattggggaagatattgaaggaaaactgatacttgagtggaaggaaggaaggaaggaaggatggaaggagggagggagggaaggagggaaggaaggaaggaaggaaggaaggaaggaaggaaggaaggaaggaaggaaggaaagaaggaagccagcctttgaggcactagcacagcctgtgcaaggccttggcataaaatcacgatatgcttgaggagtagagggtaactaggggtgactagtgagagatgaggccagggccagatcatgaaaggaaatctctgacaagctaacagattgtacttttcttcataaagccacaagaagggtggggtcagctccgggcttaaaaagatccctctggaaccatgtgagggacctactggaggcagggaggaggctggagcaatggtgatgaagcctgagccaggccagggccctagggatggaggaaaagggacagacagacataattggggtggagggacagagcaggggtcagacgggatgtgggtgatggggagggaggaaaggaggcaagacttggaacttgtgaccttgtgaggtgaaatcttgagggatgtctgggggctgcctggaagagttgggtgcaccatcctggagctcgaggattgcgtttagaaaacaatggcaagttggttgctgaggtcaagggcaatgccaatatgtctctggagaaaccgagaggtacttgggtcctgagggagagcagatagatccagcccaagtctgggaacctgggatgagaaggcggttggacagggaaatgctgatctcctctgggacccagataagtgtacgagatctgtggaacatccaggaagtttaggcaaccgggactcctgggtcctgtcagggaagggggcttggtggcatcgagaacaaccctttggtttttggcttctgcccttagggggctaatagggccatcctcatgtagggcagcacgagaggagggcaggttgtagaaggtggtgaattcatgtgtaggttgcagcctggaagaccttttgtatatggggtctgggaccggcgggggagacagtgggcactgttagggttggagctttgagtgagaagaatcagagaagaactaacctttttgtttccacagagaaacttccagggagagccagcgcaccctgaagaaggaaggaaggagccatccatgtggtaaggagctgagccatccgtctgcctcagggtgacaccttattcacagctgtttacagtaggaggactggatgtgccctgaggggatcggcattcattcattcactccttcttcatgtcttccgggagcagaacctgggcctgtaggccaggagatgaggcctggccctgccctcaggtctaggaggagatctggttcctgaccctgccttgggggagggctcccagcgaggctgccatgcctgaatggggtgagggggggcctctggaatcagcgtggattcagattccagctcaggtactttgcagtcaggctggtgtaagcatttggttgtatgccgtgaagtcccagccctgtgattgggatgtgattgttaggaggctgtgtccaggcctctgaggatggagaacgcactagatgactgggcccaccctcctccggggccctggccttcgggcctctggtttcctgtgttgcttccctctccccctcccctctttcaggctcccagctgcggctactaatgaggctgcctgccaaggcctctaattggacttgtctgggaagagctgagattgggcgggatgggagctctggagctatgacctccctctgcgtcaccagagaaaggaggggagaaggggctgagcagtagtggaagtgggggaggcaggtgccatgcgagtttccagaggtcaggggcagtttgatccgcaggttggaaagctgggagtgaggaaggtggtgaatacaacggctcctaaatgtagccagctgtgagggcttggaccttgagaggggttgggtcccaagtagaagtttcaggggatcagatagtgtatgtctgactggggcctaagagcctggatcctttatcgcgtgggagcacagctgtattcctgagggtatctctgagggttttgggtctgaagctggtggtggtggcaactgcagggctggatctctggtccccagtgaaggcagtggctggtggtatggatggctgggtctctaaggggcattcaggctgggcagcttgaggcctgagtccccaaagcagcatttcagggactcagatggctgtgaccctaggaggggcctccctaggagcctcccgccgaggcagggtcaggagccagatctcctcctagaccgagactcgctgagggaagggtcaggtctcatctcctggcctacaggcccagggtctactcccggaagatgggaatgaatgaggggcatgctaacccctcagggctcttccagtcctcctggaagagggtcttgcacctaagaggattcggcatggggaagagctccaacagttgagttctgtgggctgggaggtctgagttggagtcccagtcctcagagagcacccagtgacagtcattgaaaaatggctcaacccactagacaggaagggggtttcgacacgtgctctggggtcttacagaggcctgaatctctggtattttggagggtgagagagccagaagcctcagttcccagctgggggatctgctggggaagtagtggctgagaaaaccaatctgagatgaagaggcccccttattcttttagtggttcacagaccctttgggtaatttggtgaaaattcctgtgaaaaatacatatgcaggacaccccccaggcccgtccgtgctgcctggcctcccccaggcccgtccgtgctgcctggcctcccccaggcccgtccgtgctgcctggcctcccccaggcccgtccgtgctgcctggcctcccccaggcccgtccgtgctgcctggcctcccccaggcccgtccgtgctgcctggcctgtgctaagaccccctgctccaaggcttctctcccagcccatagtaggcaaagggaaccagggagaagaggacgaagccagcagtgactttgttggccctcaggttgaccagaagagaggaagaggaggatgcagagagccaggtcacggtaggcagtccccagcacccctccccagtccccatccactccacacccacagaggctgagtcgtttcaactcttcccaagccccagcctcacactccaactcctcaggagcagagagaaaaatcatttggccaagagataacaaggcctttgctgtagctaatgagagcgatggtgaggtggggggaggcctggaggctagtgggcggccaggctgctcccaggggaccctcccagccacacacacagggctgcagccaccacaccgcaggcctcatagacgtggctacacccccggattgcataaatgcacacgcacatgcgcccacactcgggagaggttgggccggccctccccagccagcctcagaactccctgggggcgtagtgcccgcagcccccctgcctgcagccacacaggccagttcctctgctcctcagagcccagtgcccggtgggggttaagatttccattctcaggcaaggacggggaaagaaacttggtaaggagaggtgaggagccctcagttgtgagctgaggaatgcaggagctgggctggagtctgcctgttgtgggtcaggcactgtcagggcccctggggctcttcagggtccaaaccggccaagatggctgcctccaggacactcagctcccagcaccctggccccgaagcccacctccttcaacatactacactcccttgcagagactggggctccacctcagcttcctcacagctcacatgggcataatctcttccttgctcccagggtggggaggagggttaaggactatgtcataaagggcctgggtccctgcctggcacagcaggtggtagaggtgaagatattgattgtgattggtgttctgtttttatttactgccattatcattgtcattcatcatcctcatctgtgttaaaaaggtatgggggtaggaaagccaaagacccatagaggggaggcccttccggggagacatgggggatgaggcggtgcagtgggtggggcctggccctggaggaacagctggggctttgatctttgaatcctcagatgaagtgttggaattaatcagtgaatttagtgtggttgctgggtgaaagatcaaaataaaaaatcatatttcagtatagcaaccatgagcaattagaaaaataaatttgtaattataccatttataatggcatggtgttttgtttttggtttttgttttgagatggagtcttgctctgtcgccaggctggagtgcagtggtgcgatctcggctcactgcaagctccacctcccaggttcacaccattctcctgcctcagcctcccaagtagctgggattacaggcacgtgctaccatgcccggctaatttttgtatttttagtagagacggagtttcgccatgttggccaggttggtctccatgtcctgaccttgtgatccgcccgcttcagcctcccaaagtgccgggattacaggcatgagccactgcacctggcctgtaatggcatgtttttaattagtaaagcgcctgccgattctggcataggcaggaagacaggattcttcatgaggcccagcacaggggtgggcacctgtagaagatgtggtctctgccctcagagagcttagatacttccagaatccaatggaaaacggaggtgatgatattgaatagctcacacagacattgagcactcactatgtaccaggcgctgtccaagctattgcccccgccttttttttcctacattcactcatttagtctccatgttaaccctatgaggtggggacatccctggccagcagatggggaaagagcggcacggagaggtgtggtgacatgccaaggaccctcagccagaagctggcagaaatgggaacccgacctggcagcagaagtgcactcacttatctcctgagctccaccactttctatgtggccacttgtgtccagtgggctgacctgagcacctctcagtccagaacccggtgcctccaacgcatctcttctgtccttgcaggctgatctccctgtccctctaggagcccctcgccctggagacatcccagaaaaccctccagagaggtaataggacccacagggtccaggagggacactggggcaaggaaaaacccagtggtgattccctccttcaccccagcagacctgcgcggcgggaactccagcaagccctggtgcctgtgatgaaaaagctggtcccagtcaggaggagggcctggggccagctctgcctgcccccacagcggctcaggtgtgcccccaggcgtctccagaaggaaggaggtggtctgacattgggaagagcaggggctgcccagaccctgccctaaatgctctcccacctccccaccagagtcactcgacatccactgatcccagctcctgtcctgggcctgctgctgctgctgctgctctctgtcctgctgcttggcccgtccccacctcccacctggccccacctccagctctgctacctccagccccctccagtgtgagaggctctacttgcccctcagagcagtgtctagctcaataaatcccctggccctctctccactgggatccccattgttagtccactgttgcgcaggcttaccctagatagagtacaggggatccacatccctgtatttttatgtgaagtctcctagttttttaatgctgacatttcttaacaatagcaaaactcccccagtaatggattaagcactaaggattattccctcacaaaacaagcctggcgagggcagctgtgggcacacagctaagtctcggttgccttggggtcagggcctcagtgattctcctgtcccctccctcatgctcaggagttggcagttgtagcttcctacatcacatctgcgggaaacggaaatttcttccttcctttttataaagagaggcagtagcctcagtgtgcagtgggtagattcaaatcatattcataataaaagagaagcagttgcctgcccagagccaccagcagacttgtgtttgtttcactagccagactgtttggtgtgaccacccttaactgtaagggaggctgggagacctgggaggtcaagtacctctgcggggactgggtaccttgaaagtgccttgccacacacctcattcacactgaaaaacactgcaggccatggacctaacaaacactctgggagtcacctacacaccaccaccagtgtgcagctgctgagtggccttggcatgcatggccaagctgcttcgaagggctccaggatacctcttctccttgatttctttctccttcctaccttctctacagctctgccttgccctcccccgataggatcctgactctgtcctgccacccctccacgggtagcagcctaggttgacccagtcccaactgcatcctaagtcaataaagaacaatcttcttgggccgggcacagaatcacttgaacccgggaggcggaggttgcagtgagtggagattgtgccactgcactccagcctgggagacagagtgagactgtgtcttaaaaaaaaaaacaaaaaacaaaaaaaaaattaaaaaaacacatgcgagaccccaacccctccctcttattcacatggaccatctgcatggtgcagctctgaggcatcattatgctgtaagccccttcccagctggagtaaagctgaggacaccaaagggaagcagatggagtctgagaagcctaccctactcccgaaaagaatacatgattgggcacccactctgtgtggcatgtggcccatggtattatgcagggaatgccccaagctttgcctgcctcatagcaccgccagcaagatccttacaccatggctccaacgctccctgtaaacaacaagagtggacacccaggatggctggccccagggtgggagggcgctgagctaggcactttgagatatgtatttaatcttcacctcaacactaggaagtagatggtgctattattgctttacacatgaagacactgaagcacagagaagttaaatgacttgacctagatgtcacagctaaaaattatgagagttgggatccaaactcagtctgagtccagttcagcaaatgaactcacacggtggctgtctgctgtttgtagcagcctatgagttgaacatccttccttgcctgggaaaatcccaagataggaaggagacagggccccaccttcaaccaggagagtcaaaggagggtccccttccccagctcccagggggttgggctgctatgacaggcagtgtgtggggcccatgcccatccctgtggccaaggagaaggatcacgagattggcagccccaccagaccctccagtcacagctgtcgaaggcagcagcaactctacagaaaaaggaggacagggatgaggaccaggcacacaccagagttgtcctctagagtgcaaatggtaaacaggaaaagcaccagggtgccatttattcattcaacaaatatgtgttcatcatctctttgcaacagctagaccttagaagatgaagctgtagaggaaagcaggacctccaacatcaagctgaggagcttagattttctcctgagaatgatggggctttgggaggttttattgcttgtttgtctttggttttttacattttaattgaggcgcagcttacatacagataggcagacaaatcttaagtatcagctggataaacttttgtgtacgtatatacccatgaaaatcacagcccaggtcaagagagtagacagtttcagcaccccagatgcttccttggagagttttgagcaagggagggacagaatcggacctatttaaagacagatggaggtagctgcaggtcctgtgagagtccagaaaaggcaactgattcggcttggaggttacaggattctttccagacaagtgacatttgtgtttagtcttgaaagatgggtaaggtttgggttacagtcagcaggggcccagggagggtgtcatagaggtgggaaagagaccagtgtgtctggagagccataggcggcatcctgttgctggatttaaaaaaaaaatttttttttaaagatttggagcctgggagggattgaaggctacagagtggtgggaaataagagaggtaggcaagagcccatgaagggatttgaacaccagcttgaactttattccctagtgccggtaaaagggttgtgagcaagggaaggcagaactctgggtaggaagaagagcattcagggcctgtggaggagatgaatgaatgaaggggatgagaatggaggccagcaggtggggaggagtctggggctgtggtccaggttggagagaatgaggcctgaggcagggcatgtgggtggagaggagggaagagcagagccagggcagggtgggagggaccgggctggagactgacaagctgtgaaggatggcgaaaggggcaggacaaggacaacccctgggacctggcccagtgactagtagacagtggagccattcccaagatagggaacccatgataaggagtgagttcagagaaagactcagttcatttaggggctggagtcctgagccctgagctcccaggctggagaagggggtctgggtgttgtcagctgtgggtggtggcagaagctgtggggactgctgaatttgcttgagagtagagtggggagggaggaggctccagacaccattttgagcaaaacctcaaatgttctgatacggatcgggaagaaaatagagtgtgggaagagaccaggccagtacccagctaccaggcccgcggggaaacaggaggaggctcttcatagggtctttgtgaggttaaaagagttaatgcaagcacagcacttagaagagtgcctgctatatagcaactgctcattcacattttcattccatttctccatgagagtggcggaaaagtctagacttttgaaattgcacatacccggattccagttattcttttgtcgcttagtagctctaacaacttaggaaaattcctcctgactttcagtcttatttgtaaaattaggccaactccagatagttttgaggaatgcagtctttcctttgttattcggaaggacagaggaaacagtcccgcccccacagtccaagggccaattagggctcggtccgcctcccgaaaatgcaaattttgggacgccttgccaaacacgcgcggcggccccgcttcccgcgcagcagacgcggccggctccactctcttctttaaaccaatgagagcgcggtccgcacgaacggcgccccaggcgcgctgatctagccctctgcggaccaccgggttgccatggttaccacgaggggcggagctgaagggcaggctggacctccggggagagagacagatttcgattggctcttttctcgcttcacctgcagcccaggtatcttcccgccctttccctgtcctttttggagcctgacgcctgctcctttctcttctcctgccccagcctggcgccccgaaggtctctagagaaggagacccgaagtcagaaaaccctgaaaaaaattgctggacgctgctgtgagaagaggaaacccttttcaaataaaagcgttttgctacgtaacgggcgctgtactgaagtcttatgaagtatatcttattggatcctcgtaacagatgaagaaaaggagacacagagactgacgtcaagaaggctttctcagtactacgcagctagatttggaggaccctgggtttggatgctagggctgcctcacaccagagcccgcgatctttccactgtgcctggggagaagtctggaagtgatgggagggaggaacagcgaaattcaaagatgagagctgatggagagacagatagaaacctaacggaggaaagaaaaggaagatatgaaggagtcaggcagaggaaaaaggaaaaaagaaagtgatggagaagggaaggaagagtttcagaggcagaaggagaatagagagaggaggcagagattcccagaagaccagaaagccaaaagggtgaaaggggagataaccacaaggacccagggagacggggacacatacccagagaggaaagagacccagagaaagggacagagacggaggaggacagagaccttggagattacagagaaccagagagaaggggacagagatgggggtagggagggacaggggcccagaatgaaaggagggggcgggggggtgggggcgatagggaagcagagatccagaaataggaaagaagccagcttcctggacaaagacaggcagagagaaacggaattgaggaaagaaaatagagtggggactgaggagagagatgccagagtggccgacacagagtcctgtctcttttctaccccccatttcaagccccgcgcccccaacccaacgcacacgcaggtcgcgcaggaactaggcgcagtccggagcgcagggcatggtctttattaagatggggacgggcagcgcgctcagggcgcatccaacaccagcagcttgtgcatgtacgagttcagccagtggcggcgctcgagggcggccagcaaccgcgcgcgctcccggaaggccgcgtcgtccgccagcgccaggctcctccgcggcctgggggtggcgggatccgcccaggcccgtcctggggggcggaggctgtggagagacgcggtgaccgcgcgtccagactcgctcttgccgccgcctgtcctccccgcggtctaactcgaagccccgttactgcccagtccgtggagtggctcggtccggctccccctgtctctctcgttctctgtgtgggtctctgtctctctgctcaccaggttcgaaactccccaggtactgagaccgagtctgatgcacttgtccgcccacagcgctcagcgcatggccaggcgcacaccaagaacccaataaacgttgctcaaagaatgaatccgtttctgcaacgactcctttcgagcctctccacgcctttctcgggatctatctttctgtgtctctttcccttgctgattttctgtccatttcccgcaccaccactaccaccaaaccctcctcccgccttcccccacccctagtctctgtcttctcgctgggtctcggtcgccctctctttgggcttctgttccgctttctggatcttccgtcccctttctctttggttctcttcccacttctccaagttcccacccctccctgggagttctgggactggcacctacctgaggaccccgaccgggggcagggcgactcccgaggcagtgcggacgccccagggcaccaccagcagcagcagcagcagcagcagcagccgaacccgagggctcctggacacctggcgggtctccatcacctgtggagaaccagaaaggggctcagtagggctgcatcccggcccagaaccccgggccccaccatgcatccacccccagcttcccgcacagtcccctaccgtgcagtgggctggggcagcgatggtggcagcccccttatatcgcctccgcagcccccgcaccgggcagtgacgcaggccggggggccggggacgcggggtcaccccctccccaggctcattaggagccgccagcggtaatgaggagccgggggtgggggacctgccgctgccttggccgccaccaactaattgggaccagaagctggacctgagacgagggagggggagagacagacagacagagaggtggacacagggggtgtgtcagagggctaaaaatagagactggcggaaggaccgtcagaggaacagagacacaaagagaaggacaaagacagagtggccgaggaagaaatagagagaaagaatgggaacgacagaaaaagaaaggaaaaggaagaaaacaagaaaagagagcgaaggagatggaaacgaacagtcagatggagatggaggagggaaagaaaaggctctcagaaagacagacggaaatggaaggacgtcctggtctggaaggagctgcccagagataaatacagcagcgagaggcccagaaagatcgagggtgaggtagggaggggggaaaggcaagaaatggcaaagggtacgtgtggcaggggtgtgaggacaggaaaagtgacagaccacatcagaaaaacctcagagagtgagaagaggggaaaacagacagggctcctgagctgccctaaggatgtgtctaagcccttatctgggaggagtttgggggtgctgtgaagattaaagcccagtcctcctcacactgactctttttgtgtgtgtgtgtttgtctgtttgagatggagtcttgctcttgttgcccaggctggagtgcaatggcactatctcggctcactgcaacctccacctcccaggttcaagccattgtcctgcctcagcctcccgagtagctgggattacaggtgcccaccatcacgcccagctaatttttgtatttttagtagagatagggtttcgccaaactgttggccaggctggtcttgaactcctgaccttgtgatctgccctccttggcctcccagagtgttgggattacaggcgtgagccagcacacccagtccacactgactcttaagaggggcctcagccgggtgctgtggctcatgcctgtaatcccagcactttggaaggccgtggtgggtggatcacttgaggtcaggagttcgagaccagactggccaacatggcgaaactccttctctacaaaaatacataaattaggtgtggtgtaatcccagctacttgggaggctgaggcaggaaaatcgcttgaacctgggagagggaggttgcagtgagctgagatcgcaccactgcactccagcctgggcaacagagtgagactctgtctcaaaaaaaaaaaaaaatttaaaaagaggggcctttatacacagtgaggagaagatgggcaaaacttggaagtcctacagagcagtagaaacttgggatgtgggaacttgggctcctagtttcctaggaaggtggtggcagaagcttggactcctgagtctaagagtggatgggacagggacccagattcctatgttctggggaaggaggaggctggggacttggattcctgaatctgaggaaggaaggagctagaggactggagttctgagtctggggggagggagctgggggatacaacttaggggacttgaaataggaaggtaccagggaactagacccctgggttttcaggtaggagagggtagagggccaggaccactggtttcaaaaaaataatttgggccacatctccactagatcaatccagtttctaactcccttccccaccccagagaaaatgtcctttacttctgtccctttaagagtctaagtctgtcgctaggctcccaggatcccctgggagggggtgaggtgcgtcacctgtgtgcccctgagaccctacctcccaccgccctgcccagatctgttctgcaacattcaccgttctctgcatccagctctgcttatctgctgttaccttggacaccagagcaggtaagagaccccaggacctcaagtaagcctgtcccatcgatgtgtcggccgcctccacctccacctgaacacagacctatgcttctctgcccagactggccccggagatgccgaaatcctagctccatcttcaataacagacttgagagtcctgccccaaagctctcttcttcaagtccctacccctctactctgcagagcccagaccccagaccctatttctggaggactcagagctcccaattcctttctaactcaggaaccaagagctcaaggcctcttatctcctttcacccctgcaatccagcccccaaaccttgctccctcaaaattctaggcacctgaacttccagccttctcctctctaaagaaccaggagccaggaacctcagccccctcaccctgcaagacgcaggagtctgaacccccagcaaccttcttaacccagagcccaaatgtctccctcctccctcaaatccatgagtccagccctcagccgttaggagcctcctgtagtgtaaacaactgttgagtcaaggtgtcccgggggacctcggagaggaaggagatcccacgtcccctcgaagccctgacactccctaaagtcgaagtcgaggagatctgaggcctggagaagtgtcgttctttcccaatttttctaggacccctcgctgaaacagataaggaaattaactacgactcccaagtagccccgcgcctcagtctctcttggctacctgggccatcgccccacaagcctccaagggacttgcgattgggttctcttcccatccctggcgccaagctgggccccggacagacgtggtccacctgtgttccagtgggcgtggcctccgggagtgggcggggctcctgggagccttcggccttaaccccttccttcccgctctcccccgcagctataggtatctgccagagctatgaaatcattcagccggatcctcttcctcgtcttcctcctcgccggcctgaggtccaaggccgctccctcagcccctctgcctttgggctgtggctttccggacatggcccacccctctgagacttcccctctgaagggtgcttctgaaaattccaaacgagatcgccttaacccagaatttcctgggactccttaccctgagccttccaagctacctcatacggtttccctggaaaccttcccacttgacttcactgagcccctcaaccctgacctccgagaaaccccgcacccagagtctcctgagacccccaaagctgactcactcacaacctcaatatcagaatccctggacatgcccaaaactaacctctccaaaatggcacacccagagtcttctgagacccccacacctggcccaactgaaatgccacacccaggatcccctgagacccccaaacctaacttctccaaaacttcacgcccagaatttcctgagaccccaaacactgaccttatgcaaactacaccccaagaatccccagagattctgcagcttaatgccactgaagtctcacaggcagaactccccgagacctcaaacactaaccctaccaagacccctgaccccaaatccccagaaaagcatgacctcaactccactgagaccccaaactctgaatttctccaagctctccatcctgacccttctaaaaccccccacccagaatcccatgtgacccacaatcccagccccaccgaaatttcccaaacagaattccccacaacctactaccaaaatgcaacagatgtacccaggacctccgaccctcaaatctccactagtctctacccagaaacacctgtgcccttcaaggatgacgccactgctctaaatgagctgtccctgaatcccaaaccaggaacacctgcagccatccagcccgactccccaaaattgcccacttcagattctccaggaatggttgagctgaaggccccccagaactctggccctaaggagtccaacgtccctcctccctcagcccggattgcaggtccccctgctcttccagggcgccccagtcagttggcccctgccactctgcgggcaccccagaggcacagccgaggtgagggagtcaacaccatcatcgtggtggagcgagtgaaggagaccggtgaggggcaggagccggactcctgagtctgagggaggggctgggggcctggactcctgggtccgagggaggaggggctgggggcctggactcctgggtgcgagggaggaggggctgggggcctggactcctgggtccgagggaggaggggctgggggcctggactcctgggtgcgagggaggaccggctggggtctggactcctgggtctgagggagaagggtttgggaacaggaattcctggatctgagggaggaggggctaggagcttggacccctgggtctgagagaggagggggttaggagcttagattgctggtatcccccttcaggcgtgactctggtggggcgaccacgtggcgcagcaggcggggccctctgcctgttcttcgcggggaccgcgctgctgatcggcatctttgtgctgctgtggtgtctttaccgccgggcagctagacagcggcccttcgcacatcaccggcttccggacgacggagatgaaccgggtgagcgccctgccccttgaatgcctgcacttttccataacctggtctctcccggcactacagggcgccagccaaaaaagcacaggtcccccacccaaggtcaatgaaagccctggctcttccatggcaacgtccagccccctaaatgtctgcaatttcacccaagagtccagtgccgctcccaatgcggttggaaacggcttcaggcccagagccggccgtccccgccagccccgcccctgcccctccaggtacgcggcccggagccctgtacttcccgccctccactgcaggccccgccgctgctgatcggacgccacgcctcctggtttctgcagcggcccccaccctttttattgaaaactcagttcaaatgcagaatcggaatcctctctccggcctcctgatcggtcggccgcacaaaagcggccctggagatgatctggaagggggcctggagggtcagcccagagatgaccacgcccctttgcacccacagttctgcatttggacgccccgaaagacccctacgacctctacttttatgctccggatacctgggtcccttcccacatcgccaccaagcagcccccgcccacacctcctctgccaccaaagctgcccccgccgccccgcgggggtcgcccgcagcgtctggaggccctgtcccccgccacgctccccaacaacttcgtgtgagccccaccgagttctgccggacctgcacatccccacagtgaaggaaaaccctgcgcttctggtatgcttagctagagtagtgccccggataaagggtctaatatacagagatgcttgcgctgtgatcagagaacaaggtctgagaccgaataaatatcatgttcccatggctagacccctcctctggcctgagccctggggtgggaggggctggagtctgagaccgctgaaacttggggaggagaggctggggtctggacccctgggtctgagggaggaggggctggggcctggactcctggtctgagggaggagggacgggggtctggactcctgggtctgagggaggaggggctggggcctggactcctgggtccgggagaggaggggctggggcctggactcctgggtccgggagaggaggggctgggggcctgaaaccctgggtctgagggaggaggggctggggcctggatccctggaactgaggaaggaggagctaggggcctgaactcctcggtctgagggaggacggggctggggaccaggatgcctgtgacctccacagccaagaacaactgagcctatacaccaaagcttttattgggagtggggcagggcaggatttacagtcacagagacagagacacaaagacacaaccctgcactgggaaaaaacacccctggctcctgccccattccctttcatgggattctgtgacttctctataggttccccaaattctaagctgaaagaggggtgtctgagaggggaaggatcccagattttgagtcattaagcccctgagggacacaacaaatggccactgagaaacagggtagttcgaaaccacccaggagaataaagtgcgaggaattggggagggggcatcatgaaaccaccatgggggagttcaatggtggtagcttcaaacctttgagttcatggactggagcagccactatttagacctgaaaaccatgtcagaaaaagtgcacgggggtagagaggcatattgttaaaattgcgattttggttgtttccccagacattatgctaagctagggagaagagggtcttgagaaatttggtgctttcgcagaatctgctggtaggggagatgtgaagtgggcacggaatcggggacttgaaaccgccattttccatcagaaacgctggtgagaatcaatccctggaatggcggggacgagtaattggttaaaccaatctggaagatgcagaacagagttgggagagatttgaaacttctagaggaggaccttgaatttttctgaaaggagatgggagctgagtgatctcaaaggttagcctgagagtccctggagataaaggaaagcggggggtgtgggtgcctcaaaaccacaagagagagtaagaggtcgaactgtccattcaaataaagccctgaaaggagagatttgaaaccactgaggcagaacgggtggagagggaacctttaggggaatttgggtatccttgaaactgtcagtctgcagcttcactacccctgagaggcaattgggaaggaaagaggatttgacagcactgggaacaagggagagtgcttcttaggcctgaggcaggacagagaggagcagggttccttgacactgtcactcaggccagagatgagtggaatggaggtcctggaaactgccattcagtgggaggcacatggtcagtagtcccggacagggggtgggggcctggggggctgaaatgtgctgtgtgtggccccataggagggcgggggtgcagggggtgcccccgggggctcagcctcatcctccatttcgctgtcgtcactgccagccagctggtcatggccaacgaagccacacttctcctcgctcatctcctcaggctctgcccacggctgcttctctccagaagcaaagaccccgtagaagatgacacctccatagtgcaccagggaggcaattaggaacacgtactgccactcctcccgagtctgcaggggacaatagggctgaggtcaaatgggaggacagagaaacagaggcggagagagggggaggcctagaggaagggaggcagagacccagggaggctgaaaaggcagggatggcaccccagagacagtgccaccacgtggtcagttaggtacgaagcacacacttggaggcagactgagtcaggactgcggcacccaccttgtgcttagtcatggcccccacgatgatggggcacaccatgcccgacagtgtgcccacgccgttggagatgcccatgaggatgctggcgtagcgcggggctatgtccaggtggttcacgttgaaccctggcggagagacaagtcggaaggcgtcacaccggaatctcactcgagtgattcccactgggacgttctcaaccctctcccctccccgccactcatgttccaccttttgtgaggctgagaggccccgttcctgagccaggaagttccctacagagctgaccagagtcccccaagctgcggatccgcggttctcaccagagatggcgaagccgctgaagcccacggctaggaccaggaaggagatggccacgcccttggagtgcgagtagccgaccaccaacagcagcgtggcttccatgccgaagcctacgggggcggggggggcccgcgtctcctgagtgtcggccggagcaaggcgcaggctgccccacaccgcccttccagacctgctccagccccaaaccgcgtctatccaccccagtctggccacctccacgcccaggcctcttcgcgccctccacgccacccgcacccaccctaaccaggcccctacttctccaagacccagccctgaccacgcccaccagctccatcgcccctcccgtagctccaccccttgactaggccactccccgaacacgcaggatccctgctgtgcacgctcacaccttcccctcaatccccactcatgagtttttggttttttttttttttaatttttgattttttattttttttaagagacaaagtctcacgacgttgcccaggctggtctcaaactcctgagctcaagtgatccaccggccttcgcctccgaaagtgctgggataacaggggttagccaccatgccctgcctgttttttaatttttaattgtaattttaatttttctagaaacaaagtctcgctctgtcgcccaggctggagtgctgcggcgcgatcatagctcactgcggcctcgcagttctgggctccagcgatcctcccttctcagcctcccaagtagatgggaccacaggcgcgcgccaccacgcctagcaaatctcacttgttagacagcaggccccctaggaccctgtctctccaggtgccttgctcttagcgcctcttcatcacctagttcatgtcctaccacacccaactttgtgcaggtcttgtccctccaggcccaactcggtcttctctctgctccacccgggaagtctcgcccaccctgcccttccgcgcggtggccccttggacggccgcgtgacagtccctttcatccaggcctgccctgccccggctccaccctgttggccacggccctttgcatagaaagggactcctggggcaggctggatggtttccgcctgtaaccactccccatcacctctcaatccggctctgctccacccaggctgtcctagagccggcccaggccccgccccactcacctccgcagttcatcaacttgcgcacgttggtggtggacatgatgcggcggctccgcaggaagtccgcgatctggccgccgatgggcacgatgatggtcatgaccaggtggggcagcgcggacaccaggcctacctgcgggaacaggtgtacagggacactagggttcggggccgccggctcggcgtctctgcccggtccgtgcaccaccggctcctccctgcctcgggatcgccgccagttccctcccgccgacccctccgcgcccccctgccctctcctcctgggctctaccttgctgatctcgaagccgaacacttcttcgaagtaggcgggctgggagatgagcagcaggtagaacgtccagctgcggcagaagttggccacgatgatggcatagactggcatagacgtgaagaagcgccgccagggagtgctaaacttctgtgggggcgaggggagggccgctaagacggggagcggggctgagggcttctccgcgtcccttcagggaccacagtgtagttctgcagaaaccaaaggatcccgaccgcactgaaacttctatggacccaaaggcgcgggctacaccatgttgccgtggggacccagggatcctagcctcaaggtgacacttgagtgatgaaggggtcctggccctatggtagcctctcaggtccgcaggtgtccgggcccctcagggacctgtctttttctttttttctttttatttttactttttgtattttgtattttgagtagagacgggggtttcgccatgttgcccaagctggtctggaactcctgggctcaagcgatcctgcagcctccacccccaaagtgttgggattgcaggcggaagccactgagcctgccctaggagtctctttttatcaaaaatgctcccaaaatacagcctcaactcaaggtctaagcaaaacccccacattctaatcccttctctgctggctttaactatgccctgtcagtggttctaatcctgctcaactcccgacctaaccctgcccccagcacctgagaatctcgtcctccgcgggttgcaacccgcctcctaggttctagcccctctctttgcgttccagtcccgtctcctctagagtctgcaggaaccgtccctgatctacacgctgtgcaggttcgtggcttgctatctctccccgccccttccccgaagatttggtcccggaccgtgagggggttcatgagtttcgcgctctctccgatggcgtcctcgatgtacttgcgctcctcctccgagatgctggggtgcagcgcgggggactcgtaggagacgagcagccagaacaggtaccagaagatcccgaagctgcctgggggggtcaggagggggatgggagcgaggtgaggaccggccccgctccgccccagcgccacccggaaccaggcatccgggtccctcaccgtagacgtagaaaacagagctccatcctgagtactgcacaaggaccccggcgaggggcatcgcgaccaccgccccagcataggaacctaagggggaggatgcgggggagagaacaggcccatcttccctcagatcaaggagtgcggacccccaccgcttccccctttccagacactgaattacaggccacagcccctcctcccttagacccaggaatccaggcctagcccctcctcgctcggacccaggaatccaggcccccagctcctcctcccccagacccaggagtccaggcccccagctcctcctccctcagacccaggagtccaggcccaacccctcctctctcagacacaggagtgcaggcccccagctcctcctctcagacccaggagtgcgggcctccagtccctcctccctcagacccaagagtccaggcccccagcccctcctctctcagacccaggagtccagccccagcccctcttccctcagacctgggagtccaggtccagagtctcctcctcctccctcagacacaggagttcagcccccccagcccctccccgctcagacccaacagtccaggccccaacccctcctccctcagattcaggagtgaggatccctcttcctctcaccacaaaaggctgtcgtcgccaggcgactccgttctaagggtggggcccatttgctccagatcccatggcaggcggggtatgtgaccccctaaagaggagaaaaccaaggtcactgagaagaggcagggtccgagcgagggcagggtcatatcaggcggggatttacctctaccaacccctgcaggatcctcacgaagatgacacagccatagtggacgcgggcagctgaggggatcagcatgtttagagtggatgttgccacaatagcaaagccgaaaactctgatgggaagggtcagagaaaagaatccaagctatccagccatgcccgggattctgcctttcccgcccacagcaagctaggcccagtggtccccgggaccccaggtcccaccacctctctgacttacaccttcctcaatcgcaagccccacctttctctaagacccacccccaaatccaggcttctcccatttaccagagccagcccgcaaattcaagaccacgccctctaactccacccacacaactgtagttaccgcccactttgagaccccaccactgtacctgttggctgcaaatttttgacagataaatcctcctggaatctgagtgacaatgtagccccagaaaaaggagccgtgtatgaggccgacagtctctggatcccagctgaactgggctttctgcgggccaaaatgtacattaaatcagccgccctgtccaggctctgccgctccaccaatcagcacccacagacttagcgtctcgacctatcagcaacgaggaacccctcccacctccaaaagcctgccaatcaaagctcacactatctttctgtcaattaaagtctacaaactccgctcttccacgttgctagggcctatgctgccttaacaacagagtccatcaccacctagacgccttgctttgcctgcttccttgcctccatgaaagcctaggggcccatgtatgatgatgactctctccacttatatccagcttatgagcgtttgcggagtgacctgcacagggtccaggcggggacacgaagcagccaagggggcggaccagattggaagggagcaaggggaggaacttcaggtaggacaaaggcacaaatcaggactcttttctgatgcaggggcaaggcctatgctgaaattaaaataggagaaaggacagggcacggtggctcacgcctgtactcccaggactgggaggccaaggcaggaggatcgcttgagcccaggagtccgagaccagcctgggcaacatagtgagaccttgtctctacaaagataaaaataaaaatgttagctgggtatgccggcgcacgcctgtagtcccagctgctcagaaggctgaggcaggagagtcacttgagcccaggagttcgaggctgcagtgatggtgccactgcactccagcttgggcgacagagcaatggccccactgcaccgtagcctgggagaccctgtgggtctttagataagggacacaacacatgcagtgggacgtaggcagtggcagggtttcaaaaaaggatcacattcagggaggaacctgagatgggactgagattaaatagatgtgacccggggacatgagcttggggtacaggcgtgagcaaaattgctagtaggtccaaaatggggcaggggcaacccctagggaacctgatgttggggcggactctacatttttcaatcaagcccctggaaataagggcgggacttcatttagatcaggacggggcttaggaaacggaggcggcccctaaggcgaggtcagaactaaggggcgcacggattgggcggagctattccgacagcgtttcggaaggggcgtggcctggacgtctggtgggtgagtgtgacgtcatgggggcgtaggcggagctcggtgagcggggcggggctctgcaagggctcaggccttgagctacctgcaccaccacgtggcccccgcggtgggtcgtgctgttattgaccatggagacgatggccacgcccaggttgcagcggatgccaaagctgatgcagaagcccagaccactcatgatggcgataatgtagcggcgagggaggccgaagcaggtgcagtccaccaccggcgggtcccgggtctgcgtggtcaccgggcgcccatccgcactcagctccagcgtctccgcgccttcctgccgcttctccagaaggctgcgggacagcaagagccagagactcggaagtccaggcccccagccccctcacccccaagaccaggatccagggcaaaacctgcttttcaacatccagaattctaagcccgcacctcctccttcaccaagagtccaggtccctggctcccttcgcccccctgatccagaaatcctccatctccctcagaccgggaattcaggcccccagccccctccttcttcacattgacggtcttcagtccccctctcccagctctgtcaaatccttcaactcaggagacttagaccccagacaaccctttgggattcaagagcctgtgcccccactccgaggcccaaagactctccagccgcctctcccggataagagtctattcgaggaagcaaaaggtgctaaggagatgcttcagcaaaggtgtcaaaagaacagatgcttctcagccacgtttgctagggggtggggagatgtccaggaccctgggaatccagcagcccgtcccaggcatccctagggaaccttgagtccaggctgccagcctagggggtagggagggggagtggcgggtggtgtcctggcaggggacagatggccctggtagggggattggctcattccccagcgtgactctcgcccccgcccgttctggatccagaatcaagtctgtgatgacgaagagggtatttggagggctgcctcaaacccagagagaggctgcagagagagagaggtgccttcagacaggtggagaaagacccaaaaagagggtgacagagatggggggagttgtacagaggcccagagagagggggtcacagacagaagaagggagagagatccagtgaaagggggacagagatctagagaggaagagacagagacccagagagagggagagagaataacaagggagcagagacccagagagagaaggggacagagacccagagatacagggggacagagacccagagacatagtgggacagagacccagaaagagggggacagagacccagagagaaagggagacagagacccagagagagaggaacagagacccagatagagagggggacagagacccagagagagggagagagaataacaggggagcagagacccagagagagagggggacagagacccagagatacagcgggacagagacccagagacatagcgggccagagacccagaaagagggggacagagacccagagagaaagggagacagagacccagagagagaggaacagagacccagatagagagggggacagagacccagagatggaggggtcagagacacagaggatgacagagacccagagagagggagacagagacccagagagagggggagagagacctagaaatagggggacagagacccagagagggaagagatggaaacctagagaaggaagcagacagagtcccaaagagaggcggggacagaaacccaggagatagaacatagatgcagagagatgagaacagagatccagaatgcaagagaaagatggagagcctgggagacggaggatagacaggctggggacgtgatttgtgaggtgcagcccctctctgaggtgggtaggcagccaggggatcgggctggatcccaggaaggggctggaacagatggaggcgagggagactgggacgggggaggaaggaacagccagacggtccagggggagggaggtggaagagctgtgagaacacagcaacccctccccatcctagaacttaaggaggtggggaggggcagttaagaaacaggggtgggagaagccagggagtggacagaacccagaaggagtaggaatgagaccccaagaggaagaagacagagagccagagataggggggattgaagccactaggacgaatagtacaggatggcagtaactccccccacccatcagaacccatcacccaaagagattagactgacccaggttgacatcggatgatatttgaccctgaaactcaagatgtgattgcagcccctgatgtgagattccttgttaatatgaggagatgtcagatctctaatcaaggctgtctaaacagggggtctcagtatcccacatctataaaatgggacaagggcaaaaatgcaagagaataaagagggaacttcaaggtgatatcaatcattttagagcaagaggaccaaggacacagagatgaaggtggccctgatgctttgcaggggacaaggacagagaagggagaccctagatgtaaatccccctcccctccctggataccccaaactcaggcctggggacttggcgatgaggaaaaacaacacttaggaggccattaccccaaattgagatgtctcaacttctctgtctctccctctctctctctctgcttctctcaggatctctgtccactcccccacgtctttgtctccttatgtccctctgctctctcttctcttcccattgtacaactaaggaaactgaggctcggggagctgaagtggcactccaaggtcacagacaagaacagcaatgggacctgatcccttactggccctcggcatccccctgcccaagacctggctctcagaaaggaggcaccttgggttctcatctctctggcatcccattcccccatgtccttgttccaagtcaccctgggtgcaaggaagctccccaccagctgtggcatcactcttctcaaggaagagctctgttctaggcttgggagggagactgacctgggttcaaatcatggggctcatactcatccactgatctccccaaccccagaatggagcctcagtttccccatctttgtctagaggattaaatgagatcaacctgttgtctctaatatggggtattcccctctccctccaaccatcagagcaaaccccaggcattggaagcaaatgcttttctctgcacaaactccctgctgatggtcctggccagagcccgggggtctctggggacccaagaggtaactcagagagtgagagccagagagattgactgtgagaaaccctagcacagatgagaaacagaggcagagactgagggaggggcctgaggaatacatccctcccgctgccaccccccagccccctccaccagcacgtctctttctctctctctcattctcctgacttcacactgatgtattttgagaaactcgtgaaaggaggcgagaaaaagggtggggaggggctggaaaattggaaaaagaaggggtgaggttatctcagcttcccctccaccaccaacctccgtcactgcaccatcctcctgcccacctccccccacttctgtccagccttattcttgtctctcatgttactagagggtggggtaactttggagctaagaggtgatctgcagcaagcaagactgatgttagacttagcaaaggacccccatggcctagcgaggtggactgaagctcagcgaaacacagggtcagggctgtgggccaaggggacagggcctgagggcacggcggcaggggcatggtgctgatgaggccatctccttcgtgcactgtggccagatatatttttaggcttttccgcagctgagtaatttatctgacttagagccaaagctggggttgggggtgagagcctgtggggaggtgtccagattatcctgagggacactcggttcactggggtcatcaacctggttgggagggagtccctgtcagccccagcctgtatcctttgggaaggctgtcctaccccaggagccgaaatttttggcctctaactcctttctctcccagggacccagggtgctgtgacttcttccacccagcctcaccccctcaaggacaacgggctatgagccccaatccgctttagctgcagattaaactccatgccagacagaaacggaaaaagacacagagagacggagagacccatggtgggagaattaaaacacagagacggggacagggacccagagaagtggggaccagagatccagggaagaggagagacccagaaagagggggacagagactctgagtcaggagttgatagagatccagtgagagcaatggccagagaaccagagagaggggcacagagacgcaaagaagcggaggcagagatctagggagaaggaggggcccagagagaagggagccgagatctggaaaaagagggagacggagacccagagagaaaaggggcagagacatccagaaagagacggggacagagacccagaagtggtgggggaggagccagagacccgggagagaggcatttacagcaccagagagagtggagccgggtggggtggggtgcagaaaaaggaacaggataatggacaaggctcgaccagggagaacagcgccgtcggagcccacggcagaaaactggacagatgggtggacccccatgccggggtatcgcccgttcatctgtcagtctgcgcccaggtgggaattagcatcctcctcagatcctcccactcttctcccgggacccccgccaggctcaccggtgcagcttcccgagagcacgacccgctagcttccgaaactcctcctggcggaactccatggtggcggctcctgccgccggtcaccccgcgggtcccccccgccgatccccccgcccgcgggcccgggcggccgcgtccgggttcccggggtccagccccggcccggccggccccgcagctccgctcggggggaaggaggctgcaagtgcaggcggcccgggggctgtcacaggactcagcgccgggggcggggcgcgggaggccccgccccggccccaccaggcccctcccctcgtctgtcagacccgccccctctcgcagccctttcatcctcgtcctgtcccctcctgagccttccaagaccacgcctgtgggttctgaactcacgcctccgagttcacgccccccaattctgttccttccccaggctactccccctatccctgttccatcacccctggctcctacccagattttctctcctctcctgagttctcatccccatcatttctctccccgacttctgttccccctaattgcgtcccttacaatcctgtcttctctgactttccctctgcgttcatcctccagttccttcactcctccccgcccccaccccgcaattccatccccatcccacctcgtccccagttccaatagtctcatccagggagttctttgttttctcattcaagggaaattctttcccctcaagtccaacgcctacttcgatccacctgtcgtccccctctagtccctttcgccacccgggttcttcacccttgagctccatctcctccttagtttccatctttcccctttgaatcccatactcctccagctctattctccctccggcgtctctctcctccctgttgcttctctccctgagtttcattccctaaccccgattttcttccctctggcttccgccccccacagttatatttcacacaccccgccagtgccagctgcgaccccatagtctccccattgtgttatttctctgctcctctgggatctgtccgcgctctgagttcttccctagctccgggggatccattcctctatttgagttctgtctccaccccctgagatctgtcccgccccctaaattgtgatccgcaccccctggcatcctcacccgccctctgaatttgtctcctcccctaggatctgtcgctgacctgagttctgcccccgccctctgagttctctccccaccgttggagttgtgtccccttctcctaggatctgtccctggctctgttcccgccctctcagttctgtccttgccccctggaatctgttcctgccatctgagttctaccccttccccacaggatctatctctgccccctggaatctgtccccacccaccgagttctggcctccgtccctgggatctgtccccgccctctgtgttctacccctgccccatgggatctgtccccgcccacccagttctccccgccccctggatctctccctaccctcccagtcttgccccggccccatgggatctgtccccgccctccgacttctgaccctcgccactgggatctgtcctcgacctcccagtcctgcctccgcccccggaatctgaccccgcccaccgagctctggcctccgcccctgagatctgtccccgccctcccagtcttgcccctgccccatgggatctgtcccccgcccaccgcctccgcctctgggatctgtccctgccctcccagtcctgctcccacccccggaatctgtccccgcccaccgaactctgtctccacgccggaattccagcgccgccccgttgggtagagcccggcccttccctgtcctgggcccgcagacagggtcccgccccgctcctgtcctcagaccagcccatctcccggcgctgagtccacctccagatccaggccccaggagggtgatcctttccccactacctccccgcgtcgggccgcaaatgcatttggtattaaattttcatgatgcggcccgcggtggggtgggaggagcagacggcgcgtcgggcgggcgccaaggacggggtggccgggaagccactgaccgccgcagcctctcgcttccagccttgactggctgtgtctctgggtctcacagctttgagaaacccctgggaccccagaacggaggacgctgcgggtctgaggcaggagggaggtaggaactgggactcgtggggctgaagtagcagcgcgggagccgctcacacgcgccacccagtggctgcagagtccccggcccgggtgcggaggcggtggttgcggcttggggccaggtgtgagggtggagcagatggtgaagaggagggagtgggaagcgggccccgccgctgccaaaacttgggcctttgccgaaaccatcgccatggaaaccgaggaaggaggaaaggactcagccgcacactttttcaggacctgggaatgagttactcggccccctccagcggctcaccgtcccaaccacaagtcccagcggcctctgagcctcagcgctcgtttgagaagggccgcgcactccgagggccgctgggagatgtagttctctgagacgatgggcagggaaaggttgcgccctctggtggacacggcgcccacgttcgctcatccgttccgcggccggaaagaccctacctgaagtcactcccaccctgacctcttccccgtcttttctccccctccctcacaattcaccccattgcagacacattgtgcttgcctgcctgccttttctttccttccttcctcttctttctcttcttttttctttccttccttcattccttctttctctgtcttccttcctttccccttcctccttcctttttctttttttctttccttccttcattccttctttctctgtcttccttcctttccccttcctccttcctttttctttctcttcttttttctttccttccttcattccttctttctctgtcttccttcctttccccttcctccttcctttttctttctcttctttttccttctttcttccttctttccttccttcctcctttccttcctcccttccttcctttttgagacagggtctcactctgtcgcccaggggcagctcactgcagtcttaacctccctgggctcccacctcagcctcccgagtagctgaggacaacaggtgtgcaccaccatgccccactaactcacattgtgctttgagcatttaccactgaagttcctccatctactgatgatcctaggattcactaaagaagaggagggtatagaccatcacttttttttttttttttttttttttgagatggagtttcgttcttgttgcccaggctggagtgcaatggcgccatctgggctcacagcaacctccgcctcctgggttcaagcaattctcctgcctcagcctccctagtagctgggattataggcgcttgccaccacgccaggctaattttgtatttttagtaagagacggggtttctccatgttggtcaggctggtctcaaactcccgaccttgggtgatccgcccgccttggcctcccaaagttctgggactacaggtgtgagccactgtgcccggcctcaacaatcacttattaactcaagaaatatttatcaaggcagggcgctcctgtaatcccagcactttgagaggctgaggagggctgatcacttgagctcaggagttcgagaccagcctgggcaacagatggagaccccgtctctataaaaaatatttaaaaattagctgggcatggtggcacctgtagtcacagctacttgggaggctgaggtgcaaccatcacttgaactcgggaggttgcagagtgagtcaggattgcaccactgcactccagcgtgggcctaagagccagactctgtcaaaaaaaaaaagaaagaaagaaagagagagagaaaggaaggaaggaaggaaggaaaagaaagaaagaataaagaaagaaacttctgcagatgtactgggaagaggatacaaagtagcaggaacagcagaaactaagagatgagggaaaatgggtgtggtcaggacactgttcagtatgactgggctccagttagaggaagaggtcaaaactaggctgggcacagtggctcacgcctgtaatcccagtatttggggaggccatggtgggaggatcacttgaggccaagaactcaagaccaacctgggcaacatagcaagacctcatctctaaaaaaatgcaaaaaataaaattagctgggcacaatggtgcatgcctgtcatcctagctactcagaggctgatgtgggaggatcactcgaacccaggagttccaggctgcagtgagctacatgattgcaccactgcactccagtgacagagtgagatcctttttttttttttttttttgagacggagtttcgctcttgtagcccagactggagtgcaatggcacgatctcggctcactgcaacctccgcctcagcctcccgagtagctgggattacaggtttgcgccaccatgcccagctaatttttgtatttttagtagagaccgggtttcaccatgtcggccaggctagtcttgaactcctgacctcaggtgatccacccagctcggcctcccaaagtgctgggattacaggtgtgaaccaccgtgcctgacaaccctgtctcttaaacataaaagtgagccatgacccggggctcagatcacacagagccttgagtgcttggctgaggggcttggaccttctcccagggcggctggggagccacaggagggctgtgaagaaggaaagtgcagggccagctctggggcctggggaggattaacaagggagactggaggccaggaggcttcagggaggatccagggggaaggatgaggcctgagctggggcagtgacctctataggactggaggggcacagcccaatgtccctcttccctcccaacacccacatatccccagtcagagacagaacaaaggcaaaaatcttttatttcaacttttagggaagccagcagcctcttctccacatctcagaagcacaaggagacaccctgatcaagaaggcaccggcagaagcggcatggccaccattaattgctgaggagacagagcaaagagaatgaggatccaggacccagaagtccagctcccagcccccctccctgggagacagagtccaggccccgccaatgtcccagcttccccaagcccctcccccaggcacctttctcttccggtggaaggctgccttgctctcatgagagttgatctgcagcgggatataagcgtctagatgatacagctgctgggggccccccatcaccaggcggttctccccgatctccagcgacagccccagggctccatcctggagaggtggcggaatcaggtcaccctccccagcaacaggatgatcacctggaccaggcatggtagcctcacacgctgggaaactatatttgaagggtctaatctcccaggaagagacagaagacagcaattacaagtctcaacgaccgagcacttacaatcccttgggcgccctcaggacagcaccagaaggtggcctgtgggcctcctggcagagaggacgcaactgacaagtccagcaacaaccccttgtcactcacactcagagacagtccctgacctttccagacctcattcccctgctctggtccagcgcgcaaaactcaccagtttggggaggtcaacttcggccaagaggaggtcgggggcttccagccacaggttcaggtgaggcttttcaggcctgaggaggaacaaggtccagggctgagcacagctgccaggtctttgcctggcgtgctgtcccttttctccctccaaccagccctattggcctcaggacgccttcccagtcaggagttctctctcctccctctctcagtgcccagggccccaggacatcacccagtgtgggaggatggagggagggattcccaagagcgttgaggaaacatcagaccggggatctaccgaaggcccaccctgactcagctctcccgggggcgggcgtgtacaggtcccccagctcctggatccgaggacgctgctccgagcggatgttctgctgcgagatggagcccatgaatggccggttcttcatcatgcgccattctgagggtcaggagcgccgtcaaacatcgtacaggtcagggttccctttgtgggggccaagagcctcccgggataggctccaccggctcaccaggactcttggggtctgaccacaccccgcaggcttggctccaggaagcccgcccaccttagtcacgcccctcccatgatatgccccaataaaacccacccctggagatgttcctggccccgccccctcagggcgtccagactccaccccctcctagtagcacagactccagggcaccctgcccaagccagcccctcctctcctaggggtgttccccaaaccgctcctggctccactctttcccgagggcccaggacctgcccctcacccggattcagctgcaagttgtatttgtcctcaaggccctccctggcgatggtgatcacgagctcccgcaagaaatcgctgttctggggtgacagagagggaaaagacaggcggtggcggggagggtaggggtagagacccctgcccaggcctcaaccgcagccccgcccccaacctgcatcctccggtagaagtcgctgttgacagctacgtcgtaggcggtacatccctggccttctgcggggagaaaaagggggtgaggaccccccagccctctgcaggaagcccacagcccagacccagacagggaagaaacattcagggacagcggccgtaagaagcagagagagacataaggaagtgagagctgggcactcactttccgctctggactctccgcccagcctcctccctggcctcttatctcctgtccatcagtgtgatgtcactagagttgaccctatcccttccctgctcacagctcttctctggctccccagtgctcccaagtgaaggtctgagccccacaagcctggcgttggagaccctatgtggtctgcccctcccacctctggagaagacctcattcttctagcaacctcggcccactgaatttctttcagtcactctccattactggctgatccaatccaatcattctctcccagctctgggccgctctacctagaaccttcttctgtctgcctgctgaactcctcctgttccttcaaatcttatcccacaccccctcctccaggaagccttccctgaccccttcatgtgggtgacgagccctctcaaggctgtgctgggtgcccccctccaaagcagcgtgaatcacaccctattgatactgcatccatctccttgagccccacccatgacagcgagtttctggaacgtggaatgtgcatttcataggtccttattccccggggcactgcctagagcttggtcccagaaagcttcaagagacatattgaaaaaaggatatagaggcagaaacagggacagaggtgaggcaagacagagatggagaaagggagaagggcagaggagaaaacaggatgaaagagagagccgcaggctgggtgcagtggctcacacctgtaatcccagcactttcggaggctgaggcggtggatcacctgaggtcaggagtctgagaccagccaggccaacgtggcgaaaccccgtctctattaaaaatacaaaaattagctgggtgtggtggagcacacctgtaatcccagctgcttgggagcctgagacaggagaatcgtctgaacctgggcaacaagagcgaaactccatcacaagaaaaaaaaaaagaaagaaagaaaaaagaaggagacagcaggctcaggactaaagccaggagatccgctaatgcacgaagagcactctgcccaggcctcccggccctggagtggggcatggaaaagtgccagcctggccaggtggcagaaccaggactgcccgggtgtgggatgtccagggcactagagatctaccatagggaaaagaatcagatcgaggggccagatctccaggagctgagggaggagggtcctgggcccaggattcttgggttctagggaagaaggggcctagcgggccagactcctgggtcctctgagggcactgacttgcatccagttctgcatgaggctctcccagactcatggggatgcgaaacccagcttggtcctcctctagcatctgaagcagctcctcctcggtcacgtcggcgggaggagggatagagggggagtggcagatgttgatgaaaaccttcccttccgaggagttggtctttatgcagaaacctggtgggagtgggttagtcatgacaatccttttctgcacaagtcccagtccccatccattgtctccaggctctgtctcttttccttttgccctgtcccccttttttgttccactccccacccgagatccctcacttctcttttttttttttttttttgagacagactctcactctgtcacccaggctggagtgcagtggcgtgatctcggctcactgcaacctccacctcccaggttcaagcaattctcatgcctcagcctcccaagtagctgggattataggcgcccaccaccacgcccggctaattttcgtatttttagtagagatggagtttcaccatgttggccaggctgatctcaaactcctgccctcaggtgatcctcccgccttggcctcccaaagtgctgggctcccggccccctctcttctttgttttctccttgtttgttttttgagacagggtctcactgtgtcacccaggttggagtgcagtggtacgatcttggctcaccgcagtctcttccacctggctcaagtgagcctcccacctcagcctcgtgagtagctatgactacaggcacgcacccaccaagtccagctaattttgtttatttttagtagagatgaggtctcactatgttgcacaggctggtcttgaatgcctggcctcaagcaatccttccacctcggcctcccaaagtgatggaattacagatgtgagccactgtgcccagcctctcttcctatctttgttgttgttgtttgtttcgttttgtttttgagacagagtctcgctctgtcacccaggctgcagtacagtggtgcgatctccacccactgcaacttctgcctcttgggttccagcaattctcctgtctcagcctccccagtagctgggactacaggcacgtgccaccgcacctggcctcttcctatctctgattctctggccccctacctactcctactctgtcctccaactcctttctgtcctaggatgatctctgtgggtgtctgctcaccccacccccaccctaggcctttattttcgtgtctctttccttcctcctctctctgtcctctccctgggtctcctgtccctctctctccggtgtcctttctcaccaggctgaggctggatttgtgtcgattctggtctggttgtctgggcttgctggagctccttcgaggcctgtataaaggaaaactacctccaggctcggagtctgtgccatcagacccctcatttgttcctcaaatggagcaattcttatgcatgagagctgtggataacgcgagaaattagacggtttaggtcccctttctcctttgagaactagaagaacaaccccaaccccattcccatttctttttttttttttttttttttggagacggagtctcactctgtcgcccaggctggagtgcagtgccgaggtctcggctcattgcaagcttcgcctcccgggttcacgccattctcctgcctc[175 bp omitted]cccggccccccactcccatttcttagcaaacttgaagcccattaacctcaattccccgaggcctggttcccgccttagtgcattctgggaactgcagtcccatctttgagcaccccgccaaaatccccgaatactcaaggatccaggggtccggtcactgcacctgcagcagcagctcctcaaatcgcgccgaatcagcaccgatcgcctccgcctcgcttagccccattcccagcagcttcgggttcgccatggccctgggaaagagatctaggcgtcctcgagaccctcaacgtgggaaactttgcccaggatccgaaccccagtgcctgctctggccctcaatcgactccggatacctactatcctgttcaaaaacctaagactggcctaagactacatttccattcaagaccgaacaccatcgtcaaatccgtggggaatatgtgtctctagacgcactaccctccgtcctacgtgccgaactgtaaacgaagccacacttccggtctatcggtaaacacaggactggagtatgccacacttccgagtaccccagtgttcattcacaagctggtatcgcgttatcgacaagccacgcccctcgcatcaatcaaaaataaaccccaaggcggatccctgagtgccacacttcctgtatctatgaaagccacacttccggctgggcgctgtggctcctaccggtagtcccagcactttggaaggccagggcaagaggatcgcttgaggccaggagttcgaaaccagcttgggcaatacaatgagataacgtcccacaccccatctcttaaaaaaaaaaaaaaagcgccagacttccactctttccacaaccaaaactggcccccttactttgcagtgaaggttgcattttccaaaccttaatctcaatgtccatcctaaaaggtaccctttttatctttgaattatcacttcctgccagctctagatcctaatacgtccagatctagacccgccaggtctagatctagatctagacctctagtcaatataattagaaaagctgcactttgaggctgggaggccgaggtaggaggatcgcttgagcccaggagttcgagaccagcctgagcaacatagcaagatcctgtctctaccaaaaaaaaaaaaaaaaaaaaaattagccaggcttgatggcacctgcctgtagtcccagctactgtgcaggctgacgcaggagtaatgtttaaacctgaaaagtcgaggcgacagtaagccgtgatcggaccactgcactccagccctgggcgacagagggagaccctgtctcaagaaaataaaaggtaaaacaaaacctgcacttcctgctactataaaacaaggcactgggaagacgcatcaataggacgaccctttttttttattactattttttttttagacacagtctccctttgccacccaggctggagtgcagtggcgcgatctcggctcactgaaacgtacaccttctgggttcaagtgattctcccgcctcagcc[131 bp omitted]cggcctcccgaagtgctgggattacagccaagagccatcgtgcccggccacgccgatcctcataaatccggagccctcctaactattcgcaaagtacccacatcgccgtctccccttcctccccgttttaagcagtgcgcatgctcctaaatacgcttccccgtgggggacgtaggcggggccatcgggtcctaaggaaaaagtgtgggcgtggctgctctctgtatcttgtagccccaccccattcccattagccccgcccctttgggctggaaccggaggtgtcgctcttcggacctcaaggttccccttaacacagagcgccccgcagtcttcgcggaaagcgttcggggtaggcgatggctgcgacgcgtgcagggccccgcgcccgcgagatcttcacctcgctggagtacggaccggtgccggagagccacgcatgcgcactggtgagagtctgcccggccggcgctgctcgctgcgttccccaggcctgggcgcccggtttttcgcggggagtcccgtcatccactgcggtagctcagccgctccgcctctcttagtccccgtgattcccgccgcccaataggatcgcgccctgtaggacgctcccttgagccttggcggtggcagccttttagtctgttccggtcttccccactggttctcttgccccttgatcctgaactcctcgtagtgtttccgcggttttcctgaactcctctagacgctctcgtgattcctcagggtcccctcagaacctgacgccacccaccagaccccttaggattcctgtgaggctccagtgacccacaacccccattgtctttccacgactcttcaaaacatcctatggcttccatgggcctccagagcaccccagacctcctgagggactcccttcatccctttgattacccagagaccttcagaacttccatggagcccccgtgatcccataggacccctcaatactcgtggggttcatgtgacctcatcggaactctcaggagcctagaatacatcaggacttccggtttgggttgggttttttttttgtttttttttttgagccagggtctcactctgtcgcccaaactgaagtgcactggcgctatcacaccactgcagcctcaacctcctgggctcaagccatcctctcacctcagccccccaagtaactgggaccagagacgcgcgccaccactctcagctaatatttgtactttttctagagacaaggtttcagcatgttggccaggctggtctcgaactcctggcctcaagtgatccacccacctcgacttcccaaagtgctgggattacaggcgtgagctactgcacccagccacatcaggacttcctgtaattacttatggcccctcacaataccctcacggggctcctatgatctctctagctctcagaatgtcccatagggttcccatgattgttcaggaacccctgaagtcctcgtgagggtcccatgatcccctgggggtcctcagaacctccctaggactcccatgacccctcagaggcccccagaaccctcgtggggttcctgcaaatgagtagggcacctcaaactttctgtcgtttccccaggcactctcagaattccttcacggggctctcatgatcccccagggtcccccagcacccaggcgaaaggagcttaggcttctttgagggggagggcaggaggccagagcaatgatccaagtggaaggaactggatcagaaccctggcacagcctagaacttggggaggccaagacgggcagatcgcctgagctcaggaattcgagaccagcctgggcaacatagtgaaacctcgtctctactaaaatacaaaacattgggccaggcgtggtggctcagacttgtaatcccagcactttgggagtcctaggtgggcggatcacctgaggtcaggagttcgagaccagcctggccaacatggtgaaaccccatctctactaaaatacaaaaattacctgagcgtggtggtgtttgcctgtaatcctagctacttgggaggctgaggtgggagaattgcttgaatccaggaggcagaggttgcagtaagctgagattgcaccactgcactccagcctgggcaacggagcaagacgctgtctccaaaaaaaatacaaaaatggctgggcgcagtggttcacacctgtaatcccagcgctttgggaggccgaggcgggcggatcatgaggtcaggagatcgagaccagcctggccaagatggtgaaacccatctctactaaaaatacaaaaaattagctgggcgtggtggcaggcacctgtaatcccagctacttgggaggctggggcaggagaatcgcttgaacccaggaggtggagattgcagtgagccgagaccacgccactgcactccagcctgggcaacaagagcaaaactccatctcaaaaaaaaaaaaaaaaaaaaaaggaaacagaaaacaaaagattagccgaggatggcagcacacacctgtagtcccagctacccgggaggctgaggtgggaggatcacctgagcctgggaggtgcagtgatcataccactgaactccagcctgggtgacagaataagaccctgtcccccctgaaaaaaaaagaagttgaggccaggcaagtggctcacacctgtaatcccagcagtttgggagaccgaggcaggaggatcactcgcacctaggagtttgagaccagcctgggcaacatggtgaggccctatctctattaatataaaaataaaacataaaaagtgaagttgagacttggacttgagtccttgcatttcagacccgtggtcttgcctacaccagcaaagttctcaaccgtacagtctctgggccagactcaaccaacaaacatgttttctttggcgtgaactttattttttttttatgtgaaatgctggacaattgattccatgtaaacatccgggaggtcctcttgaaaataaaattccaaaatgtgtcaacatttggctcaacttccctgacaaaagtcatctgggaccaatagctcctgtcttttccatgaatcgttaagctcctcttctcatccaggccctcttctcaggcctcctggaaccctctggacattcttttggaattttgtttttcttttggggggaagctttccaacttgcacagaataattagcatttattttgaactcctgtttacccatcactgtgcctcaaccatcatcaacatttatcccagcgctgtttccttctgtattttctttggagtaatttaaacaaatcctggatgtcacagtattttcctataaatatttgaatcctttcttctaacagataagggctcattttgttacaaaactaccatggtctgttaccacacttaacattaagtcattctttttgttttttgtttgtttgtttgagacaggatcttactctgtcgcccaggctagcattcagtagcgttcatagctcactgcagcctgaaactcctggacccaagcaatcctcccaccccagcctcctgactagctgagactacaagtgtgcatcatcatgactggcaaattttttacttttatttttgtagagatggggtcttgctgtgtaggtccagactagtctcaaactcctcagctcaagcaatcctcccgtctcagcgtgggaaagtgcagggattacagatgtgagctaccatgcccggccaacaatcattctttaatgtcatctgatgcccagttcatgttcaaatatccctgactttctcacagatgtctctctccctgtgggcgtttgagtttggaacttctaagta[131 bp omitted]aaaacccatctctactagaaatatataaattagctgggcatggtggcggccgcctgtaatcccagctacttgggaggctgaggtaggagaatcacgtgaacccaggaggcggaggttgcagtgagctgagatcgcaccattgcactccagcctgggagacaagagcaagactccatctcaaaaaaaaaaaagaaagaagggccagtaagagaaaaatcaggaatatgtgacatcagagatgctaggggagtctgtagaaggagcaagtgagcagtgtgctttggatttagcatcagggaagacgtgaccaggatgagaaagaaatatggaggagaagtccgggcgcagtggctcacgcctgtaatctcagcactttgggaggccgaggcgggcggatcacgaggtcaggagatcaagaccatcctggctaacacagtgaaaccccatctctactaaaaatacaaaaaaattagccaggcgtggtggcaggcgcatgtagtcccagctactcgggagcctgaggcaggagaatggcgtgaatccaggaggcggaccttgcagtgagcagagatcgcgccactgcactccagcctgggtgacagagcaagactctgtctcaaacaaaaaaaaaaaaaagaaagaaagaaatatggaggagatgtggtgagtgagatgtggtaaaaaaattttttttctttgagacagagccttgctctgttactcaggctggagtgcagtggcgtgatcttggcttactacagcctctacctcctgggctcaagtgatcctcccacctcagactcccaggtagctgggactacaggcactcaccaccacacccggctaactttttgtattttttgtagagatgagctttcaccatgttgcccaggctggtcttgaatgcctaggctcagaccacctcggcctcccaaagtggactccaaataggtgccactgttgtggcaccagcccaaggactcagttgagaccctaattgaatgaattaaagatgttgacacatccataatcccagcactttgggaggcca[134 bp omitted]agattgaggcgggagaatagcgtgaacccaggaggcggagcttgcagtgagctgagatcatgccactgcactccagcctgggtgacagagcaagactcagtctcaaaaaaaaaaaatgaaaaaatgttctagaactagagtggtgatggttacacaacactgtaaatgcacagaatgccactaaactgctgaactatacactttgaaatgctctattttaccacaaactttttttttaaagcaataggaggaaaagaattagctgatggggcagagggagacagacgtcccctcctagaggattctgggtaggggttgaactgccccagctcctcccgaacccctttccaaactgtctctacctcccccaggcctggctggacacccaggaccggtgcttgggccactatgtgaatgggaagtggttaaagcctgaacacagaaattcagtgccttgccaggatcccatcacaggtacgagatgtcccccagtcattagtggaagggaggtatctgtgccctctagccctacccaccaacacccattccccttgcctagggccctgagggcaggaaacagctggtggtgggagatgggctgcgatgtctggttccttctgaaaccagtcaccctaattatggttccgggtctctgtggaggctttgtgagactgctgtctgttaaaatagcttccttgccctggaggtgatcatagccgtgacccagcagagaatggggaccagctttacactcttgggctgatccaggctccgaaaatctcagccccctccagatatgacatgggctactcctcccatctgagtccccccacttttctccccaggagagaacttggccagttgcctgcaggcacaggccgaggatgtggctgcagccgtggaggcagccaggatggcatttaagggctggagtgcgcaccccggcgtcgtccgggcccagcacctgaccaggtgatgcagctgaggtgtggaccccgggaggcggggaaccccagcatccactcgagaccatgggaacaaaggctatttcccaagatcccactgaattaatttgcagctaaggctcagattcccagtatgtgctggaggcagtcgtggctgaaacatgcatccgttgtccactattcactgggactagaagccacaaagcctctatttcccaggacattcttggagtgcattggggctcagttcactggggctggtgaagcccctaaatccatttcctagccgcttgcggggaagctagagacaaaaattccatttcccaaaacgcaattgaggttagaagctaagactcaatttcccaaaagcttcagggatttccggcggccaagacctttacacagcatcctcagggtttgtgtttccatgactataattctcataaatcttcactgccctctgccccaggtaaatggtggggatgcctcaggggctcatggggattgtagtccaggtatataggagcagcccaggactctgcaaggctgagggccgttggaaaatgagcaccctcttgctttctcgacaggctggccgaggtgatccagaagcaccagcggctgctgtggaccctggaatccctggtgactgggcgggctgttcgagaggttcgagacggggacgtccagctggcccagcagctgctccactaccatgcaatccaggcatccacccaggaggaggcactggcaggctgggagcccatgggtgagaccctggagtccctagccctatcctcccacatgactcagcagtgctagctccagtcccctcattctttttcttttagacagagtttcgctcttgtcgcccaggccggagtgcagtggcgcaatcttggctcactataacctccgcctcccgggttcaagtgattctcctgcctcagcctcctgagtagctggaattacaggcacccaccaccacacctggctaattgttatatttttattagagaagaggggtctcatcatgttggtcaggctggtctcaaactcctaacctcagatgattcacctgccttggcatcccaaagtgctgggattacaggcatgagccaccgtgcccggtcccctcattctttttcttttgtttttgtttttgtttttttctttttcagacagggtctttctctgtcaccctggctggagtacagtggtgcaattatagctcactgatacctcgacctcctgggctcaaaatcctcccacctcagcctcccaagtaactgggactacgaccatgcaccaccacacctgactagtttttgtttttgttttttttttttttgagatggagtttcgctctttgttgcccaggctggagtgcagtggtgcgatctcggctcactggaacctccgcctcccgtgttcaagtgattctcctgcctcagcctcccgagtagctgggactacaggcatgcaccaccacgcctggctaattttgtgtttttagtggagatggggtttttccatgttggtcaggctggtctcgaacttcccacctcaggtgatccgcccacctcgacctcccaaagtgctgagattacaggcgtgagccaccacacccggccatttttttttttttttcctaatgtagccatggggtcttgccatgtggcccaggctggacttaaacacctagcctcaagggatcctcttgcctcatttttttcttgcaggagtaattggcctcatcctgccacccacattctccttccttgagatgatgtggaggatttgccctgccctggctgtgggtaaatgatggcctggggggtcctgactcttgggtctgagaaaggaggggatcgtggggcccaaactccagagtctgagagacaagggggctggaggcctggactctgtggaaggagtctgtgggaggaggggctgcgggtctgaactcctaggtctgagggaggaggagctggagtctggactcctgagtctgagggaggaggagctggagtctggactcctgagtctgagggaggaggggctggagtctggactcctgggtctgagggaggaggggctggggtctggattcctgggtctgagggaggaggggctggggtctggactcctgggtgtgagggaggaggggctggggtctggactcctgggtctgagggaggaggggctgggacctggactcctgggtctgagggaggaggggctgggacctggactcctgggtctgagggaggaggggctggagtctggactcctgggtctgagggaggaggggctggagtctggactcctgggtctgagggaggaggggctgggcctggactccggggtctgagggaggaggggctgggggcctggactcctgagtctgagggaggaggggctggagtctggactcctgggtctgagggaggaggggctgggggtccagattcctgggtctgagggaggaggggctgggcctggactcctgggcctttgagctgccccacttccccaggctgcaccgtggtggccctcgtgcccccggcctccccggcgcccctcctcctggcccagctggcgggggagctgggccccttcccgggaatcctgaatgtcctcagtggccctgcgtccctggtgcccatcctggcctcccagcctggaatccggaaggtggccttctgcggagccccggaggtaccttcgggacaggggtcgtggcggaacgcggctgggggccgcaaggctcctcctgcggctgaactggggggggtccctaggaagggcgtgcccttcgacggagcctggcgggagagtgtgcggagctgggcctggcgctggggacggagtcgctgctgctgctgacggacacggcggacgtagactcggccgtggagggtgtcgtggacgccgcctggtccgaccgcggcccggtgagacccgtgcgctcccgtctcctcataccctggaggccgttggtgtctgtctccagtcttcggggtcccgagtctctgttcattttattttattttattttatttattttgagacggagtttcactcttgtcgcccaggctggggtgcagcggcgcgattttggctcaccgcaacctctgcctcccaggttcagcctgggagtagctgcctcagcctcccgagtagctgggattacaggcgggcaccaccatgcctggctaatttatgtatttttagtagagacggggtttcaccatgttggccaggctggtctcgaactcctgacctcaggtgatccgcccacctcggcctcccaaagtgctgggactgcaggtgtgagccaccgcatccggcctctctgttctttaggactctgttgatttatctgagtgtccatgtccctagttttccagcctctgtcttcactcttcagatcaccaacttgctagagtgcaatggtgtgatctcctgatgccccttttcctcacagggtggcctcaggctcctcatccaggagtctgtgtgggatgaagccatgagacggctgcaggagcggatggggcggcttcggagtggccgagggctggatggggccgtggacatgggggcccggggggctgccgcatgtgacctggtccagcgctttgtgcgtgaggcccagagccagggtgcacaggtgaggcagggggtagagacttgagggtgtcaggggaggaggggcctggagacccagctcctgggtccaagggaggagggagctgggcgtggacaactgggtccgaggaaggaggggctgggagcctggactcctgggtctgaaggaggaggggctgggcctggactcctgggtctgagggaggaggtgctggggcctggattcctgggtctgagggaggaggggctggggcctggactcctgggtctgagggaggaggggctgggcctggactcctgggtctgagggaggaggtgctggggcccggattcctgggtctgagggaggaggggctggggcccggattcctgggtctgagggaggaggggctgggggtccagactcctgggtctgagggaggaggggctggcggcctggactcctgggtctgagggaggagaggctgggggtccagactcctgggtctgagggaggaggggctgggggcctggactcctgggtctgagggaggaggggctgggcctggactcctgggtctgagggaggaggtgctggggcctggattcctgggtctgagggaggaggggctggggcctggactcctgggtctgagggaggaggggctgggggtccagattcctgggtctgagggaggaggggctgggggcctggactcctgggtctgagggaggagaggctgggggtccagactcctgggtctgagggaggaggggctgggggcctggactcctgggtctgagggaggaggggctgggcctggactcctgggtctgagggaggaggtgctggggcctggattcctgggtctgagggaggaggggctggggcctggactcctgggtctgagggaggaggggctgggggtccagactcctgggtctgagggaggaggggctgggggcctggactcctgggtctgagggaggagaggctgggggtccagactcctgggtctgagggaggaggggctgggggcctggactcctgggtctgagggaggaggggctggggtcctgcagtcctcggtctcagcaggaagggaccagaagtcgacttctagatcatttctctccctaggtgttccaggctggtgatgtgccttcggaacgcccattctatcccccaaccttggtctccaacctgcccccagcctccccatgtgcccaggtggaggtgagacccttaaggctgcagagctcctacccaccgccagccaagggcagcagctctgtgcctggggaagcccttggggtaaccatgtgacctgggcgtgggggctgctgcctgctctaggctccttccctggtgggtgggccctggagggctgagcctcccggtcaccccttgcaggtgccgtggcctgtggtcgtggcctcccccttccgcacagccaaggaggcactgttggtggccaacgggacgccccgcgggggcagcgccagtgtgtggagcgagaggctggggcaggcgctggagctgggctatgggtcagtctgcgtggcccgggcgctcactcctctcctcattcttccatcttcatctcccttctccctgggtcgctccccgcgcctttaactcacccctctcccggcctgccaccgtctgttttcctctgttggacaccttcatcttccccacaggctccaggtgggcactgtctggatcaacgcccacggcctcagagacccttcggtgcccacaggcggctgcaaggagagtgggtgttcctggcacgggggcccagacgtgagtacatcccctccccgtcaccagcccccccgccgccccatgcccttgacactcgcatccggcctcgcgtgccccttgcatcctcttgacaccgtccctctcacaggggctgtatgagtatctgcggccctcagggacccctgcccggctgtcctgcctctccaagaacctgaactatgacacctttggcctcgctgttccctcaaccctgccggctgggcctgaaatagggcccaggtgagtcgttgggggccagtggtctgggagtgtgaacggggagaggggaattgatgcctgtttccccgtggactggagggctggcgcgaggtccatccaaaccatctcttagtcctgctgagtaccacgttgtggcctcacactttccctaccccaggcctgccgagactctcagctctgccccatgaatgtctgtactctcccagaaactcatgggtctaggagcttggggtcccccagaggttcactggagcagaagcttggggtccctcagaggctcatgggagcaggagcttggggtcccccagaggctcatgggagcagaaacttggggtcctccagaggctcatgggagcaggagtttgaggtccccccagagactcaagggagcagtttagggtctaccagaggctcatgggagcaggagcttagggtcccccagaggctcatggagcaggaacttagggtcctccagaggctcatgggagcagaagctttgggtcctccggggctcatgggaacaggaatttggggtgccccacaggcttatgagagcagtttagggtctgccagaggctcatgggagtaggagtttagggtcccccagaggctcatgggagcaggagtttagggtacccagaggctagtgggaacaggggtttggggtcccccagaggctcatgggagcagaaacttgagtcatccagaggctcatgggagcaggaatttggggttccccagaggctcatgggagcagtttaaggtcccccagaggctcatgggagctggagtttagggtcccccagtgaatcatgggagcaggagttttagggtcccccagaggctcatgggaacaggggtttggggtgccccagaggctcacgggagccaaggcagtcttcccagtgcggtagagcatagggtctgagcagattgaggccccaggactcctcctcatgtcccaccctactccagcccagcacccccctatgggctcttcgttgggggccgtttccaggctcctggggcccgaagctccaggcccatccgggattcgtctggcaacctccatggctacgtggctgagggtggagccaaggacatccgaggtgctgtggaggccgctcaccaggctttccctgggtaaggggtcacacgggaaagcccaagggtcatggtgtggcagagaggggagcctgcccacagcaattggtggactgggaggctgggcccccagggtaggggctgtggacagaggtggggtgtcaggagagccaagaccaggatgccaacccccactgtgcgctgtctgcccacagctgggcgggccagtccccaggagcccgggcagccctgctgtgggccctggcggctgcactggagcgccggaagtctaccctggcctcgaggctggagaggcagggagcggagctcaaggctgcggaggcggaggtggagctgagcgcaagacgacttcgggcgtggggggcccgggtgcaggcccaaggccacaccctgcaggtgaagggtctgtgggcacctgggccagctgggcaggcggggtggggctcagaccagaggctgtgagataacccaggcttggaattcgggcccagccccaccgccttccacggcaggatcatcagcaagtggcttcacctctccctacctcagttccctcatctgtacagtgagtgggcacacaacccgcctcgtagagtagcgttcgccagatgatggatagcgacccattcctggaccctaaaatcaatttagtgggctgttaggcggttctcacattgctgtaaagaaacacctgggggcgcagtggctcacgcctgtaatcccagtacttcgcgaggctgaggcaggcggatcacgaggtcaggagatcgagaccagcctgggcaacacggtgaaacctggtctctactaaaaatacaaaaaattagctgggtacggtggtgggcacctatagtcccagctacttaggaggctgaggcaggaaaattgcttgaacccaggaggcagtggttgcagtgagccgagatcgtgccactgcactccagcctgagtgacagagtgagaccttgtgtcacaaaaaaaaacaaaaaacaaaaaatacctggccagacatggtggctcacgcctgtaatcctagcactttgggaggcaaaagtgggtggatcgcttgaggccaggagtttgaaaccagcctgggcaacacagtgaaaccctgtctccacaaaaaatagataaattagctgggcatgttggcaccagtctccctctggcacccggctggagtgcagtgccacaatcatggctcactgcagcctcaacctccgaggtccaagtgagccccccacctcagcctcctgagtatctgggatcacaggcacacaccagcacacatgactgggtgtttttgtatttttgcagagacaagagactcgccatgttgcccaggctgatcttgaactcctagcttcaagtgatccgcctgtcttgacctcccaaagtgctgggattataggcgtgagccactgcgcctggccagggattacatttcaacatgagattt[161 bp omitted]ccccagccttccgagtggctgggactacaggtgcccaccaccacacc[132 bp omitted]cccggccttcttttttttaaattttattttactttagttctgggatacatgtgcagaacgcgcaggcttgttacatagggatacacgtgccatggtggtttgctgcacctattgacctgccctctaagttccctccccttgcctcccaccccccaacaccatatttatttttaacaaaagaaaatagaccaggcgcagtggctcacgcctgtaatctcagcactttgcgaggccaaggtgggcagatcacaaggtcaagagatcgagaccatcctggctaacacagtgaaaccccgtctctactaaatatacaaaaaaaaaaaattagccgggcatggtggcaggtgcctgtagtctcagctactcaggagactgaggcaggagaatggcgtgaacccgggaggcggaggttgcagtgagccaagatcgcaccactgcactctagccagggcgacagagtgagagtccgtctcaaaaaaaaaaaaaaagaaaggcggttatgcaggatgtttctcaccgcccgaacccccgtggaatgattcactttgaccagcgtctgcgaaatggcaggggcttccacaatggtgcggtttgggccaacaccaagtgttggggagaatgtagaggaactggatctctcatttactgcgggcggggctcccctgccccacacgtgacccacctgtccctgcaggtagccgggctgagaggccctgtgctgcgcctgcgggagccgctgggtgtgctggctgtggtgtgtccggacgagtggcccctgcttgccttcgtgtccctgctggctcccgccctggcctacggcaacactgtggtcatggtgcccagtgcggcctgtcctctgctggccctggaggtctgccaggtatagccccctgccttcctgcctctcctccccgtagcctcagggcagcagaaaaaggcgccccaaagtcggcaggagcttgtctcttaccccaccctccgtggtacccatgctgcccccagccccagcacccaaaccttcactccttggggacccagtgcccattcttcaccctaggcctggggctttctcctccatgaccccccatccccttccctcccatgggcaccccctgaatgcccactccttgccctgcccccacggcctccccaacctttcactctctctatcccctaggacatggccaccgtgttcccagcaggcctggccaacgtggtgacaggagaccgggaccatctgacccgctgcctggccttgcaccaagacgtccaggccatgtggtatttcggatcagcccaggtgctctttgttctgttttgccatcttcagcatctcaaacttcaaacaggctcctccttttctggaaacacagccccgccctcttagaactcctgttggtaaggggagaaactccttgacaagaaggttttgaggccccgcccttaggactcaagttactaaggaagaggctgtccttagcaacaggggcctgagagctgcctagcccaaagacctcgtctcaggggacagcccgttgctaaggaccacaccctagatttggaggcccacagtctacgctttgtttttctattttgagacagaacctcaccctgtcacccagatgcaatcatacctcactgcagccgcaacctcccaggctcaagccaccgtcccacctcagcttcctgagtagctgggaccacaggcgtgcaccaccatgcccagctaatttttttcttttgcagagactggggtttctctatgttggccaggctgatcttgaactcctgggctcaagtgatctgcccgcctcggcctctcaaagtgctgggattacaggtgtgagccagcacaactggttgagtctactgtttttttttttattttattttattttattttattttttttgagacagagtctcactctgtcgcccaggctggaatacagtggcacgatcttggctcactgcaacctctgcctcccgggttcaagtgattctcctgcctcccaagtagctgagactacaggcactcaccgccatgcccagctaattgttgggggtttttttttagtagagatggggtttcgccatattggccaggctggtctcgaactcctgacctcgcgtgatctgcctgcctcagcctcccaaaatgctgagattacaggcgtgagccactgtgcccaaccaatttttactttttaaatggagacggggtctcgccatattgtccaggctggtctcaaactcctgaactcaagcgatcctcccgcctcagccaccccaagtgctgggattacaggagcgagtcaccgcgccccaccgtccactctcttaaacctcctgttggtaacagatgtgaacttgttgacaagagccttggggcccattcctttcaacatgggctgttaagggagaggaaattccctaaccactgggtccagtgcttttccctaccatctggaagttctgcttgggaggagctgggcattgtagctgcagagcctgggtccagcctgaagcccctcgtcagtaacagtcttcatcgcggaggaagcaggtgctcagcaacaagcctgcagaagtgcttacccccgtctcttcctcccctcagggttcccagtttgtcgagtgggcctcggcaggaaacctcaaaccggtgtgggcgagcaggggctgcccgcgggcctgggaccaggaggccgagggggcaggcccagagctggggctgcgagtggcgcggaccaaggccctgtggctgcctatgggggactgatgcctgagcgccacctactgcattttggacacctcacaccaaggggagatgcaccccacagacacctgggactttccccttctggttcctgtgtctcccaataaactctctgaccaaccctagctgtgcttctgcgagaagaaagggtgtagcaacttctggcagatatgaggcttttttcttttttttttttttttttgagacaacgtctggctctgtcacccaggctggagcgcagtggcacaatctcggcccactgcagcctcgacctctggggctcaagggatcctcatgcctcagcctcatatgtagctggggccacagacatgcaccaccacacctggctcgaggccattttagttctgaggttgagcagctcaggagccggctccagcacggtgctgtgtttgtgaaacagagaaaggggacccccgaggaccccagacagggccttaggactctcatatcttcttgtcttctccatctggtggctcttgctctctggttttctctaccttttcatggccccagaatccatatgcagtaaaggaactctctggaataaaattaaagtcctcctatatgacttttgtcaatttccatgatgtaaatgctcccaccgtgccggatttcaaggtacaggtgattaaacaactgcctgcgagatcctgaattgttaacaggtcagctcccatgagccaatacgagccgcttcagcacaccactgccttaggattctggttgtgggtgggtttttttggtttgttttttgttttttcgagacagagtctctctgtcggccaggctggagtgcagcggggtgatctcggctcactgcaacctccgcctcccaggttcgagcgattctcctgcctcggcctccagagtagctagaattacaggctcgcgccaccacacccagataattttttgtatttttagtacagacggggtttcaccatcttggcctggctggtttcaaactcctgacctcaagcggtccgcctgtcttggtctccccaaagtgctaagattacagacttaagccactgcgcacgactgttgatttttaaataaaggatcttgctctgttttttaggctgtaatacagtggcgcagtcacagcttactgaacccaccctcgacctgggctcaatcctcccacctcggccgggcgtggtggctcacgcctataatcccagcactttgggaggcc[135 bp omitted]gaggcagaagaatggcgtgaacccgggaggtggagcttgcagtgagccgagatcgagccactgcactccagcctgggcgaaagagtgagactccgtctcaaaaaaaaaaaaaaaaaatcctcccacctcagcctcctgagcagctgggaccacaggcacgcaccaccatgcctggctaatttttttttttttaataggcagagtctacctacgttgctcaggctggtcttgaactcctggcctcaagcgatcctctcgcctcagcctttcaaagtgtgggactgcaggcatcagccaccacacctgaagtagaattctttttgatgtaagaaacccactcttactagtttaggataaaagggagttttcagaggccaggctcggtgactcaggcctgtaatcccaacactttgggaggccgaagtaggcggatcacctgaggtcaggagtttgagagcagcctggccaacacagtgaaaccctgtctgtactaaaaatacaaaaattagctgggtgtggtggcgggcacctgtaatcccaattactcaggaggctgaggcagaagaatcactcgaacccaggaggcagaggttgcagtgagctgagagcacacacttcactctagtctgggcaacagagcaaggctccatc[131 bp omitted]aatcccgtctctactaaaattataaaaattagccaggcgtggtggcggcacctgaaatcccagctatctgggaggcaggagaattgcttgaacctgggaggcagagggggagcttgcagtgagccaagatcgtgccactgcactccagcctgggcaacacagcgagactcggtctcaaaaaaaaaagagagagagagaggagtcttctggaaggctacagagattccctagaggcaatagggcgatagggcaggacacacattgaggggccccaggacttggtcaggaaggagctagagcaggtcctttgtccatgggccacatgagctattggggcttgtatctctgcctctctgcttcatttaaatctttctagccagatggaaggtctgaccattgggtgcgacaaggcagctaacccaggctgaacaggaagtgaggcaggcagagggatcagggaagggaaatggatgatgaaggccaggacgggcgaggctttgctgcagtaacacataacccccgaatctgcgtgggccacaaccacaacattagtttgttgcttacactccctgtgctcatccggggctggcaggatccctgtgctcctccgagtggcacaggaaacttggctgatagaggcgctctctccatgcatcctccaccatccactccccggtcccttagacttccattcagaagtgacacctgtcacctccaccctcatgtgactggccaaagtgagtgtggccatgtccgagttccccaggatgggacctcgaatcctcctgctgggggggtgggggcagcagatgtttcaggacagtctgccacggatcagatgggtgagcaagagattcaggatgggcgtgatgggtcacacctgtaatcccagcattttgggaggccgaggcaggctgatcacctgaggtcaggagttcgagatcagcctggccaacatagtgaaacctcgtctctactaaaaatacaaaaattagccgggcatggtggcacgcacctgcaattccagctacttgggagcctgaggcacaagaattgcttaagcccaggaggcggaggttgccgtgagccgagactgtgccactgcactccagcctgggcaacagagtgagaccccatctaaaaaaaaaaaatgcttcagagattcagagatccacagatgtggaagagagcttctattttgtctcatgtaccacctcacccctcagtttggagttggagaagccgaggcttagagaggtcaaggggctggccaagctcccacagtgataaagctagtgctagggcgacacctgccaggcccaatgtgacaagatgcatcctgagtcctgtgtgccaagccttggcggggcaaagttggggcccggaggacggtaagacacagcaactgcgagttcccagagacagatccgggttccagccccagctcaccatgcactgggcgtgccacccagggagtcagccccactgcagcccccgctgcggggcgtccggagaacgcgccatctgcggcgtgagcggccgcctctcaccaccagggggcgcgctccgcctgggcccagattccaccccttgactgtctccccccaaaaatttcctttcactttcggtctctggctgtcacccggcttggccccttccacacccaactggggcaagcctggtgcgtgaggagacttggactctaggtccccaaggggcggagccagggtccccactcctggggcagggggagcagagggtggggggctgggttcccgggtccctaacctggggagggttctggggaccagacgtcgaggttcttagaagtggagatgaagagttttcaccgtaactggggcagacgcaggaagcctgggggaggaaggggcggaaactcagccacatcaatgggacgcgggaggggcggggaggcaaaggggcgggcagggcaggggctggggcatgagggtccgagacttgttcttctgtcccttccaagacccggcgacaggaggcatgaggggcccccggccgaaatgacagtgctggcgccagcctggagcccaacagtgcgtaaaccccagggacaagatcaggggagaggggaggcacaatgtcaggatggggcagagatgaggggagatggacgggagaacagatggacagatgacgaggaaataggaggggagatggacagatgtgaggggagatggataggagaggagacggacagaggagggggagatggacagaggatggggagatggacagaggagggggagatagaggagagggagatagagaggagtgggagatggacaggagcggggagatggacagaggagggggagatggacagaggagagggcagatgaacagaggagagggagataaagaggagggaggtggacaggaggagggagatggacagagaagggggagatggacagaggtgggggagatggacaggagggaagatggagaggagggggtatggacagaggagaggggagatggacaggagggggagatggacagaggagagggagatgaagaggagggggaggtggacaggaggagggagacggacagaggagaggaagagagacagaggaggggggagatggacagaggagggggagatggacagaaaaggggggagatggacagaggagagggaaggtggacagagccaagaacaaatgaagaggacgtggaccaagatcaagagagaagcaggcaacagtggtgtagaaggcagagggagggacagagctggaggaacccgggcgaggaaaccagacgtgaagatgaggtggttggagagagaccagcagagtgggggagatggggagagagaggggtggggcagagggggatgcaaactggacagcattggaccagaggcagagagaaaccgggaaagacaggcagagatggggccatgtctccagaaagtgtggaagaggcagaaggacacccagggaaggaggagcggggaagacagaacagtacaggtgggaagcccggaggagggggctgtgtgtggaacagcagagggctcccccagcacccgctcccctgcagacctatctcctcctgctgctgctgctgagctcgggactcagtgggacccaggactgctccttccaacacagccccatctcctccgacttcgctgtcaaaatccgtgagctggtgagcggcgctgccccggaccccctcatgtgatcccccttccccccacttttttttttaagtagagatggggtctctctccctgtgtttcccagggtggtcttgaactcctgggctcaagcgatcctcccaccttggcctcccaaagtgctggaattacaggcgtgagccactgtgcttaggggtgtcatccctttttaagggcaaggttctgtggcttcttctgggctccccctctcttggtcttgtccctctctctctggatctctgctgccacctctgggtccccacagttctgtttctcgctgttttcagccaggcctgatcctgttttctcccgcagtctgactacctgcttcaagattacccagtcaccgtggcctccaacctgcaggacgtaagtcatgttgggagggacctgggatggaggtggggaccacagactcaagatgctccaccgaggcgagtggataaccaggccctcccctccccaaacccaggaatcagagtcctcagcccctcctccctcagacccaggagccccggcccagcccctcctccctcagacccagcagccccgtgcccagctcctccctcagacccgtgggttctcccctctaggaggagctctgcgggggcctctggcggctggtcctggcacagcgctggatggagcggctcaagactgtcgctgggtccaagatgcaaggcttgctggagcgcgtgaacacggagatacactttgtcaccaaatgtgcctttcaggtcagccctcaacttaggggacaagtgaggggagggagatgccttcctacgaattagaagtaaagctccactaggccttattggcgatttggaccatagccacccaacgaaggtagagcgagaagcgccaccctgcagagccctgttcctacagaacaacacgtccccaggcaccggtgatggggagcagtctggtcccattctggggccccggtttcctaggccatgatgaagggtgccactgaggggttcttcccccaaaaaaaaacagggagagaaggggtctctaaactgaggaggccgggcgtggtggctcactcctgtaatcctagcactttgggaggctgaggtgggcggatcacttgaggtcaggagtttgagaccagcctggccaacatgatgaaatcccggctgtactaaaaatacaaaaattagccgggcatggtggctcaggaggctgaggcacaggaatcgcttgaacccgggagccagaggctgcagtgagccgagatcatgccactgcactccagcctgggagacagagtgaaactgtctcaaaaacaaaacaaacaaacaaaaacctctctctgagggctgggtgcagtggctcacacctgtaatcccagcactttcggaggccaaggtgggaggattatttgagcccaggagttcaagaccagcccgggtaacacagtgaaacctcatctctgcacaaaaataaaaataaattagccaggcatggtggtgcccacctgtggtcccagctactcagaaggctgaggtgggaggatcacttgagccctggaggtcgaggctgcgatgagctatgattgggccactgcactccagcttgagcgacagagcaagaccctgtctcaaaacatagaataggccgtgtatggtggctcacgactgtaatcccagcactttgggaggctgaggcgggtggattgcctgagctcaggagttcgagaccagcctcggcaacgtgatgaaaaccatctctactaaaatacaaaaacaaaattagccaggcatggtggtgggcacctgtagtcccagctacttgggagactgaggcaggagaattgcttgaacccaggaggcagaggttgcagtgagccgagatcacaccactgccctccagcctgggcgacaga[220 bp omitted]gaggcagaattccttgaacccgggaggtagaagttgcagtaagccgagatcgtgccactgtactccagccagggtgacagagcaagactctgtccccaaaaaataaataaataataaagtaactttgggaggccgaggcgggcgagtcacctgaggtcaggagttcgagaccagcctggccaacatagagaaaccccgtttctactaaaaaatataaataaataaataaataaataaataggctgggcacggtggctcacgcctgtaatcccacactttgggaggccgaggcgggcggatcacaaggtcaggagatcaagaccatcctggctaacacaatgaaaccccatctctactaaaaatacaaacaattagccgggcgtggtggcaggcgcctgtagtcccaactacctgggaggctgaggcaggtgaatggcgtgaaaccaggaggcggagcttgcagtgagccgagattgcgccactgtactccagcctgggcaacagagcgagactctgtcttaaaaataaataaataaataaatatggccaagcacggtggctcatgcctacaatcccagcactttgggaggccaaggtgggcagatcacctgaggtcaggagttcgagaccagcctggccaacatggagaaaccccgtctctactacaaatacaaaaaatagctgggcatggtggtgggcacctatagtcccaaccactgaggaggctgaggcaggagaatcacttgaacctgggaggcagaggttgcatttcaccactccagcctgggcaacagagtgagactctatctcaaaaaaaaattaattaattaaataaataaactctgagagccagagctcactgggccctgttgctgggcatcgccagcagggaagggcctttggcctgcggaggggcggtggggggatgacgtggtggtgacgtctccctcccctgctcccagcccccccccagctgtcttcgcttcgtccagaccaacatctcccgcctcctgcaggagacctccgagcagctggtggcgctgaagccctggatcactcgccagaacttctcccggtgcctggagctgcagtgtcagcccggtaaaggcttccaggcacccccactccttcccctcctgtcctcacggccgctcctcctctctgcacagtgcatcccagaccccatctttctcatattggttgtgacaagggcaagcttattcctctttctggagctcagtttaccaattttttttttttttttttgagacggagtctcgcactgtcgcccaggctggagtgcagtggcgtgatcttggctcactgcaagctccgcctctcgggttcatgccattctcctgcctcagcctcccaagtagctgggaccacaggcgcccgccaccacacccggctaattttttgtatttttagtagagacggggttttaccg[137 bp omitted]ctctgtcccccaggctggagtgcaggggtgctatctcggctcactgcaagctctgcctcctgggttcacgccattctcttgcctcagcctccccagcagctgggactacaggcgcctgccacctcacgc[255 bp omitted]cctcagccttccgagtacctgggattacagatgcgcataccatgcctggctagtttttgtgtttttagtagagatgggttttcaccatgttggccaggctggtcttgaactcctgacctcaagtgatccacccaccttggcctcccaaagtgctgggattataggcgtgagccaccgcgctcagcctattcactcatttaatttgtgacagtctgatgaggtaggtacaatgattatcctagttttacagatgagcaaactgaggcacagagaggccaagcagcccatccaaggtcacacagccagtggcagccaggcctctctttccttccttaccccagcccttctccttggtcacccagcctcctctttctccccagactcctcaaccctgccacccccatggagtccccggcccctggaggccacagccccgacagccccgcagccccctctgctcctcctactgctgctgcccgtgggcctcctgctgctggccgctgcctggtgcctgcactggcagaggacgcggcggaggacaccccgccctggggagcaggtgagcaggctgggaagagggggtgagggggccgagagggtggcccacttgtggctgacactttggggcccacaggtgccccccgtccccagtccccaggacctgctgcttgtggagcactgacctggccaaggcctcatcctggtgagtccttcctgggctatggggcctggactttgtgtctgcaggttgggagggtcactaggaggccatggaagggtggtgagcagt[156 bp omitted]tctactaaaaatacaaaaattaactgggcatagtggtgtgtgcctgtaatcccagctactcaggaggctgaggaaggagaattgcttgaacccaggaggcggaggttgcagtgagccgagattgcgccactggactccagcctgagtgacagagctagactccgtctcaaaaaaaaaaaaaaaaaagaaaaggaaagacccctctggggccacggagacagactggagaccaagccggaggctgtgggaaggcccagggtgaggaccatgactgagccagggctgggaccatgggatggagtggagtggatgggcagagagtcaggggtcagagatcaggagggaccggcctggggcctgacaggcttgagttggcacagatagccctggtccagtgatggggtggacaggggggaacctgggggaggagtcagattagggaaagacatggagctcactggggacctgaaggagcaaggggccctggggagatctgtggatgtgggagtttgcaagcctcctgggacaggaaggaaatggcattccagaaagagggaactgcctttggaagccctttggtatgagaaagctcagggtgttccagtaacttgggccagcgtggggcagcaaggagccatgggaggtgtgagagggaggaaaggagctgggaacaggtgtggagggtgcaggcaggtaggcaggtgggccaggagggaagaaggaggggaggccccagcgggtcccctaacatttcaaatctaacattttgtagtaattgctcgcacatatagtgccttggtaatgcaggcctcatgtggggctggcttgcttgctttatttttttttgagatggactctcactctgtcacccaggctggagtgcagtggcgggatcttggctcactgcaacctccacctcccaggttcaagcaattctcctgcctcagcctcccaagtagctgggattacaggcgcccgccaccatgcctggctaattttttgtatttttagtagagatggggtttcgccatgttggccaggctggtctcaaactcctgatctcagctgatccgcccgcctcagcctcccaaagtgctgggatgacaggtgtgagccactgttcctggcccatgctgggctttccacaaatgaactcacttccttgagaagttcgtgccattatgatcccaaggcatagagaggtaaataatttgccaaaagtcacacagctcaagggtgacaaccaagatttgacttcaggttgtcttttttttttttttgagatggagtcttgctctgtcgcccaggctgtagtgcagtggcatgatctcggctcactgcagcccccgcctcccaggttcaagtgattctcctgcctcagcctctggagtagctgggattacaggtacccaccaccacactcggctaatttttgtatttgtagtagagacggggtttcaccatgttggccaggctggtctcgaactcctgaccttagctgatccgcccgcctcagcctcccaaagtgctgggattacaggcatgagccaccacgcccggcctcgagtttgtcttgatccagcatctgtgcccttcactctgctgcctcagtttcctgatctgtacaaaaggctctaataatagtccttccaccatagggttgttatggggtgaagtgaagtgacacaggcaaggctcttagagcaacgcagtggaaacggcatgtgagccacctgtgcgattttcactttcctggtagccacattttttttttttttttcctgagatggagtctcactctgtcgccaggttgaagtgcagtggtgtgatctcagctcactgcaacctccacctcccgggttcaagcgattctcctgcttcagtctaccgagtagctgggattacaggcacgcgccatcacgcccggctaattttttgtgtttttagtagagacaaggtttcacca[139 bp omitted]ttatgcagtatatccaaaatgttgttatttcaacatgtaatcagtatttctcaatgattaatgagacattaatcagttggaatcattcatcattttgggatattttacattcttttgtcatactaagccttcagcatccaacgtatagtttatttatttatttatttttccttttgagatggattctcgctctgtcacccaggctggagtgcagtggcgcgatctcagctcactgcaacctcggactccctggttcaggcgattctcctgcctcagcctcccgagtacctgggattacgccaccacacccagctaatttttgtacttttagtagagaccgggtttcaccatgttggccaggatgatctccatcccctgacctcgtgatccgcccgcctcagcctcccaaagtgctggattacaagtgtaagccaccgcgcccagcccagacaataaatttttatcagaaatgcttcatctatatttaaatttcatgaaatttacagttgccaaaagtagactcacatagtcaagttgttcaaaacatacattaaaccagcctgggccacatggtgaaaccccatctctacaaaaaattttaaaaagtagctgggtgtggtggcacatgcctgcagtcccagctacttaggaggcaaagtaggaggattgcttgagcccaggaggtcgaggctgcagtgagccctgattgtgccactgcactccagcctgggtgagagagcaagaccctgtctcaaaaacaaaaaaaccacacagaagagtttagaatcccagttgctatctctgggaatcatcatgattgctaagaccggtatct[138 bp omitted]tggcacgatctcggctcactgcaacctccgcctcccgggttcaagtgattctcctgcctcagcctccccagtagcttggactacaggcgcgtgccaccacacccagctaatttttgtatttttagtagaggtagggtttcactatgtttgccaggattgtctcgatctcttgacctcgtgatctgcccgcctcagcctcccaaagtgctgggattataggcgtgagccaccacgcccagcctatctttttttttttttttaagaaaaggtaatacattgagcagttttcctcccaacctagtccctgtccaatctgtttcctgtcttaaatttattttttattataatttttttttttttttttttttgtgagacagacttttgctcttgttagccaggctggagtgcagtggtgctatcttgactcacggcaacctccacctcccaggttcaagcgattctcctgcctcagcctctggagtagcttggattacaagcgcctgccaccacgcccaactaatttagtgtatttttagtagagacggggtttcttttgttgttgttgttgtttttgagacggagtctcactctattgcccaggctggagtgcaacggcacgatctcggctcactgcaacatctgcctcccgggttcaagcgattctactgcctcagcctcctgagtagctgggattacaggcacacaccaccacacctggctaatttttgtatttttagtagagatggggtttcaccatattggccaggctgatctcgaactcctgacctcgtgatctgcccgccttgacctcccaaagtgataggattacagccatgagccgccctgcccaactaatacctgatattaattttattgtatctcacccagcatggtggctcacacctgtaactccttggcagatcgcttgagcctaagagttcaagaccagcttgggcaacatggtgaaaccccgtctctactaaaaatataaaaatgagctgggcatggtggcgtgcacccgtaatcccagctaactcaggaggctgaggcaggaagaatggcttgaacccgggaggcagaggctgcagtgagctgagatcatgccactgcattccagcctgaaacagagcaagactgtctcaaaagaagtttaagtccagcctcaaactcctggactcaagtgatcctcctgcctcagcctcctgagtagtgcaccggccccatctcaagtgttcagtattcacatgtggcttgttactcccgtattaaagagcaaaaatagagaacgtttctttttcttttttttctttttttttttttttttgagatgggagtttcgctcttgtcgcccaggctggagtgcaatggcacgatcttggctcaccgcaacctctgcctcccaggttcaagcgattctcctgcctcagcctcccaagtagctgggattacagacatgcaccaccatgcctagcaaattttgtttttgtttttgtttttttcttttgagacagacttttgcttttattgccaaggctggagtgcaatggtgcaatctcgactcactgcaacctccgcctcccgggttcaagcaattctcctgcctcagctaattttgtagttttagtagaaacggtttctccatgttagctaggctggtctcaaactcccaacctcaggtgatccgcccgcctcgacctcctaaagtgctggaattacaggcgtgagccactgtgcctggccctaattttgtatttttagtagagatggggtttctccctgttggtcaggctggtctcaaactcccaacctaaggtgatccaccagcctcagcctcccaaactgctgggattataggcatgagccaccgcgcccggggaaatatagggaacatttctatcatggccacgttctcttggacagcaatgccctagcacatagtaagcgcttgctgggaatggagttgttttgggcataaatctgtggcccgccccaagctaagctactttccctctcctctctcagcggagccttaaacaacgcagtgagacagacatctatcatcccattttacaggggaggatactgaggcacacagaggggagtcaccagccagaggatgcatagcctggacacagaggaagttggctagaggccggtcccttccttgggcccctctcattccctccccagaatggaggcaacgccagaatccagcaccggccccatttacccaactctgtacaaagcccttgtccccatgaaattgtatataaatcatccttttctaccagctctggccaggtctgtctatggatgggtgtgaatggggtagttttgatttcagaatcttggtttttgaattgcaatgcaatgtttcattcaatacgtgttttctgaggtcccctggagccccgggccggcgctgggcaatgtcagagcctggatttgagtcagaaccagcccaggtgccccaggtctccttggctatggacgagaagacaagggattcagcgagcctgggtgcaggatgccataggctactatggagataaaacagaggcagtgtgaggggcaactcacccaggcagggagagcagagaggctttccagagccaaatggcattgcgatggtgacaagccagatttggagggggtggggagggcatcctgggcaagggacccagctgaagcaaaggccgacagtccagaaagtgagaagttcctctgaggaacgctcagtggattggtgcagccaggcaactagaagccattccttgatccactcttagagcccctggggaagaccacctccatctgttttacagatggataaactgaggcccagataaggccaagggtttctccaggtcacagtgaagtcgaccagacacaggaatccaaatctctaagcctagaatgggcaaggctccggggctcacgccggtaatcccagcactttgggaggccgaaacgggaggatcgcttgagcccaggagttcgagatcagcctggccaacatgtcagactccccccgttcccgggccacaacaaaatatatatatatatatatattagccaggcatggtggcgcgcccctgtagtccaagttactcgagaggctgaggcaggaggatcccttgagcccaggaagtggaggctgcggtgagccatgatcgccccacagcactctggtgtggacaacacagcgagaccctgtctcacaaaataaagtaagcccggactgagtgcggaaaggcgggcctggcgggtctggtctccccatgcgggccaccagaggccctgcagccttcagtcgcttgaaggggtaatggcgcttccactcacaaacatggcggacagagcgtgtgaacgagatgaacagcccctcaaaaatatggccgccgaggctggacggccgtgccccagcagcaccgcctccgcgccccacgtgatctctcgccgggcacagcgctgaccgcggaggtccaaccggaagaatgtccggattggacattcggaagagggcccgccttccctggggaatctctgcgcacgcgcagaacgcttcgaccaatgaaaacacaggaagccgtccgcgcaaccgcgttgcgtcacttctgccgcccctgtttcaagggataagaaaccctgcgacaaaacctcctccttttccaagcggctgccgaagatggcggaggtgcaggtatgggctccgcgcgggccggggcggcaaggggccgggtgggatccaggccggaatggggtcgcaccctctctgtcttgcatgttttgcggagcttaacatccataatgaagcaaaatggaagtcttttgggataaggggaatctgtaggaaatgccgcggctctctttaggcctagggttggctacaatgtggcatttccttctcgaggcgagggtgatagagcttccagcacaggacaggtattttgcaactagattttgcttaccttgaactcgggtagtgggtgggggccctggggtagagtcttggccgaattggacccttgtgtgtcctcagcgatgaggaacacgcggaagtgtggccgggcggtctcggggcaatgagaaactgagttttggccaaaatggaaggtatttttatcccgctcagtgcgcgggctactttgatttcacgtggaggtgttaatcggggtcccctgcagctccggttcttttaattctcaatgcctttctgcggggggtcgagagctgttggctgcggggcactctggaatgaactcgttttccgtcgttttggggattggcgattgtcctgaggcgtgttactggaagtcgagagctgtgatgaatggttccacaaggatgggacatcttttgggcctgacacctgggggccctttccctggctcctggtgtagctacttaagtataaaggagggattggccctggaaaggtttctttgtgagtagtctgttgttggggcgggtgacatttcagagccaggccgatctaggcaagttgtgttcaccaagcatgtgtctttgtgcctagcacagttcgcaatgttttgcgtagttcagttaaccatattcctgaggcagttactggtatccttgttttacagaggaggaaattaaattggaattggtgattttgggccaaggtcacgacttcaggaagtctgtctggattttagagtctttgtaccaacgcttacaaagcatgtgtaacaaccagtgtgtgcttcatgcttttgcattaaaacaatgaggatttctacttttagtgttttttctgagacggagtctcgctgtgacacccaggctggagtgcaatggtgcgatcttggctcattgcaacctctgcttcccaagttcaagtgattctcctgcctcagcttcccgagtacctgggactgcaggtgcctgccacgacgcttggctaatttttgtgtttttagtagagacagggtttcaccatattggccaggatggtctcgaactcctgacctcaactgatctgcccacctaggcctctcaaagtgctgggattacaggcgtgagcccctgtgcccggccaggatttctactccggaggaagctgaggttcggtgcctgagcagtttaccggggaaagcagagtgctctatagcagagctagcatgggcttttgactactctgcctaatctcatcccacctgaaattcggttttcttccaaattaaatttgtggtagaaacatcctatacattagaagagaattagattgtgttaacatcctacaattgattggccacagtggctcaagcctgtaatccgagcattttggaaggccgaggcacacggttcacttgaagcgaggagtacaagagcagcctaggcaacatggcaaaaccctgactcaacaaaaaaaaaagtacaaaaattagctgcgtgtggtggtgcgcgcctgtagtcccagctactcatgaggctgaggtgggaggatagcttgatcctgggaggtcacaggatcacaggacagcctgtgcaacagcgagaccctgtctcaaaaccaaatcctacagtttattagttacaaggtcttgtaactgggtagtcagtgggcagagccttgctggtcttcgttcaaatccaattgctttgcaaaatacaatctgagcataaaatactcatagaagaactcagatatgaggggagtttgggcctcttaaactgctcactcactgatcctgaggcagccttgctttctcagtccctgttcctcatctgtagaacggggctccgtgcatagttcccagctctgatggctgggtgcaaggcacgctgttggcacggtaggacaaaagaagggaatgcttgcttgtgaggacaatcaaaggctgtccttgtctctgagtccttttgcccttgtctcccacaggtcctggtgcttgatggtcgaggccatctcctgggccgcctggcggccatcgtggctaaacaggtactgctgggtaagtcgctgctcgtggcccctctgtcatgggcccccgctggaggtcagtgatgagcaacattcaccatctttcgtttgagtctcacggccatgagatcaaccccatgcaccgctctgagacctgccagccactcttccccagggttggggactccaggctcaagaagtaattatgtattaggctagtttttcatttaaacaggaacttagctctggcaagtactgcgctgtgtctggagggtgactgcataggcagtggtgggaccctcaggcggctcggccctgctaagcctttccctccctctaggccggaaggtggtggtcgtacgctgtgaaggcatcaacatttctggcaatttctacagaaacaagtgtaagttaggacctgggaggagcactggagagggtctccctgtggggtgttgaggctctgaaagcaattgcagccgtgttgggagaggctacttggggtttctgagaaggcccttggaagtggggttttgggggtgctggtagactgggcaggcctcacactctcccctctccctagtgaagtacctggctttcctccgcaagcggatgaacaccaacccttcccgaggcccctaccacttccgggcccccagccgcatcttctggcggaccgtgcgaggtgagcagagcgtggggactgcaggtggtgacgggcaggcggccggtgatgagaacttctcccactcacattcgagtttcccgaccatgagatgactccacatgcactaccatctgaggccaccccatgggcccacctcagtggggtgggtgggcatccttatgaggccctctgactgggcctgctatctgtcacccaacaggtatgctgccccacaaaaccaagcgaggccaggccgctctggaccgtctcaaggtgtttgacggcatcccaccgccctacgacaaggtgagctatgccaaaccccacaggcagcggccttacctgtggcgtccatgatgttccgcaactacctacattgtttgatcctcatgaaagcagcactggctgagacgccagtccagccgacctccttccctgtctgtccctcccgggctcttaagcccctctctttctctaacagaaaaagcggatggtggttcctgctgccctcaaggtcgtgcgtctgaagcctacaagaaaggtgagtcccagcttacgctgcaccatctacttgggagatttcaggcctgctgagggacctggggacctggagcctggcagatgatgtccttatctcacgatggtctgcggatgtccctgtgggaatggcgacaatgccaatggcttagctgatgccaggaggcttgggtgggtgcttttctaacaggcctgcagagaacagttgcattatgatatgcccagctgtcagtcacctcccagctctcaacagctccggctcttcagggtgtgggggcttagatatccttacaacttcatttgttcaccccccccccccccccccgcagtttgcctatctggggcgcctggctcacgaggttggctggaagtaccaggcagtgacagccaccctggaggagaagaggaaagagaaagccaagatccactaccggaagaagaaacagctcatggtgaggccaggggctggtgctgaggggggcatctcactcctggacaggcctggcaggtgccttgctcacagagtactcttaactggcaaaggaccagccggggttggggtgggatgcagtccatgtaatgagggcaatgcaacccctcctgaccaccaccacctgcacttattcttggcagaggctacggaaacaggccgagaagaacgtggagaagaaaattgacaaatacacagaggtcctcaagacccacggactcctggtctgagcccaataaagactgttaattcctcatgcgttgcctgcccttcctccattgttgccctggaatgtacgggacccaggggcagcagcagtccaggtgccacaggcagccctgggacataggaagctgggagcaaggaaagggtcttagtcactgcctcccgaagttgcttgaaagcactcggagaattgtgcaggtgtcatttatctatgaccaataggaagagcaaccagttactatgagtgaaagggagccagaagactgattggagggccctatcttgtgagtggggcatctgttggactttccacctggtcatatactctgcagctgttagaatgtgcaagcacttggggacagcatgagcttgctgttgtacacagggtatttctagaagcagaaatagactgggaagatgcacaaccaaggggttacaggcatcgcccatgctcctcacctgtattttgtaatcagaaataaattgcttttaaagaaatctggcgtctttgcactgtgtctgctgtggaggcaggcccctggcaaatggggggtgaggagcttgaagagggtagaatgggctgtgctaatatacagaatatatgtaacttgctataaattgaatgatcctttatagacaccgtttacaaaccaaagacataaaatgtggccagcagtgcctggtgcttcctagttaatgtaaagctgtctcattctaattcagctgcaaagtatggacccatgccctgctgccaggctgctgtagtcccggcggtctgtagagactagcattttgcaaatgataagcactagaataacagataacgctaggctttatgcactaagagaacccattagatctgccagtctgaatcccagaaagggcactgatacagagcatttagtactaggtagcaatttcataaaatgtccctggtcaaagcttgctggagcaggccccgttcccattttactgatgtctagcagtcgtgttcagtaatacgtcatacccaggtctccacgctaaacagcctaaacactaaaagtaaacatgctgtgaagtaaaggaagctagattcatgctgtccttgcggttggatgccaagattcaggagtaactgtttgttacctgtatacttacatgtacaaccttaccccagagaaagatgagtggacagtgatgtgcattgtgttgatagcagattataacttgccacaccattccatcaggggcttattaacctttccagaagagtctgaagagaccgcagtggcttgtgttttccctgagaatcagtgaacatgggtggtgcctacccctgccagagtccccacatggattctcatccaccagagaagccgactccagaaataaccagacttagagcataatcttcaatttcaccaattccatgtgaaacggcacaattatcctccaaaagcatgatccattagcaaatgggaatgtgggctttataaaaatttttaagactgagaagacaccatcaggaaagacgagccacagactaggagaaaacatttacaagtcatctctttttgaaggtcttgtatcctgccataaagaactcttggccaagtgcagtggctcacgcctgtaatcccagcattttgggaggccaaggcgggtggatcaactgaggtcaggagttagagactagactggccaacatggtgaaaccccacctctactaaaaatacgaaaattagctggacgtggcgcagggcgcctgtaatcccagctagtcgggaggctgaggtaggagaatcacttgaacccgggaggcagaggttgcagtgagccgagattgcaccactgcactccagcctgggcgacagagcaagactccgtctcaaaaaaaaacaaaaacaaaaaacaaaaaaaactcttacaggatgtggtggctcacacctgtaaccccaaccatttgaagtgagaggactggcttgagtccaggagttggagtccagacagggcaacatagggagactctgagttaacaagaattttttttttttttttgagacagagtctggctctgtcgcccaggctggagtgcagtagcgcgatctcggctcactgcaagctccgccccccgggttcacgccattctcctgcctcagcctcccgagtagctgggactacaggtgcccgccaccgtgcctggctaattttttttatttttagtacagacggggtttcaccgt[134 bp omitted]cactaactgatacacaatacacaagccactaaccccacttgtggctcctgagcacttaaatatgaatagagtgaggctgggtgcagtctcacctgttcccggaactttgggaggccgaggctggagaatcacttgagcccaggatttcgagaccagtctgggtaatatagcgagaccttgtccctactaaaaataaaataaattagctgggcatggtgacacatgcctgtagtcccagctacttgcaaggctgaggtgggaggactacctgaggctggggaggtcgaggctgcagtgagctatgattgagccactgtactctagcctgggcgacagagagataccctag[197 bp omitted]ctgaggcaggagaatggcgtgaacccgggaggcggagcttgtagtgaaccgagatcgcaccactgccctccagcctgggtgacagagcgagactccgtccaaaaaaaaaaaaaaaaaaaaaccgtaatattcagctatagacttgtgctgttcaacacagtagcctttagccacatgtggctatttagatataacacaatcaaagttaaacatttatgtcctcagtcataaaagccacatttagagtgccagtgactaccgtgtccaccagcgcagatatagaaaatttccatcacataaagttctactagacgatcctgttatcttcagaaaaacggcagaaggatcgctccacgccaacccctggcaccaattaaatcatcgtctgcggatgaaatgaggagagagtagctttctttctctttttttttttttttgagacggtctcgctccgtcgcccaggctggaatgcagtggcgcaatgatagctcactgtagccacgacctccccagctcaagcgatcctcctccctcgacctcacaaagtgttgggattacaggcgaggcgcactgcactcggcgagagtaactttctttctttcttttttttttttttgagacggttttgctgttgttgcccagcctggagtgcaatggcgcgatctcggctcactgcaacctccgcctcccaggttcaagagattctcctgcctcagcctcctgagtagctgggattacaggcatgcgccaccatgcccgactaattttgtatttttagtagagacggcgtttct[143 bp omitted]tgtcgcccaggctgtctgtcggccaggctggagtgccatggcgcgatctcagctcactgcaaccttcgcctcccaggttcaagcgattctcctgcctc[134 bp omitted]tagcctcccaaagtgttgggattacaggcgtgagccaccgcgctaggccgagagtaactttcactgcacctctgaaagttcgtgggcagctcctgcccctaacaaagatggcgacgccgccacacatgctcctagcactccccggccgcccacccttcaaaaagatggcagccgcctcatccggtttgaaggctgaacgaacagagccacgcggtatccaaatcccacgggagcctacgccacgccgaaacaggatggactccgtacgactctcgcgataatacgggcgggctgaaggctggtcacatcttccctgcctaaataatcgcgcccggcgttgtggggcctaagactctcgcgagacaccgtctagcacttcccgcccgtcagtccttcacagtgcccgaatcgcccgctggtttaagtgcagcctgtcaatcagagcagctctcgaggccccgcccaaggccgtgctgcgtttctccttacgtcacttcctctccagcccctgcgtaatcgataaggaaacccggacgctgctgcccctttctttttttcaggcggccgggaagatggcggacattcaggtgcggactcggggttggatgccagggtgcggggtccgccttggccttcaggggcgcgtccgggagggcagagcccggcggccaagttcgggggttaattccgggcgtccgtgattattttctagagattaactggagtggagggcgcttgcttttgtttctagatgagtgcttcctaattcctgggggctcctggcgttaatggaggctcaagcgttttaggacttaccttcttaaaaaccaagtttaagaaggtttttttggagttctccggtcttcaggggtaattctgtggaaacggactcctaagggctaatccagggagcctgccgtctggtatttaattctgaatccttatgtactacataaggagtgaatcctgggtgggcgatcttgggtcttggagaatgatcctcgctgaaaggtgtccagggtgtgagagggttgatcctggtttagaggatgaattttgcaatccctgagaggccttctggagtatataaattgaaataacctcgggcttagatctgagtatgaattacaggtaaggtcagggtggtcatgtcttagagggtgattctggggcaccaggccttggacgccggcgctttgcaagtaaatgtagagcatggggtctgggaggttctgggaaggtctctagggctggttggctgccggcttcaaacttagcagctcatcagttttctcctcataatctgtagactgagcgtgcctaccaaaagcagccgaccatctttcaaaacaagaagagggtcctgctgggagaaactggcaaggagaagctcccgcggtactacaagaacatcggtctgggcttcaagacacccaaggaggtgcggggaacctcagaagaaagaaggggaacctggcgttcctgcacgtgtgcccacgacgagttgccctgcctgcatctaagtggcttctggggctgctgggaattgtagttgcttccctgaggccacgcccctggctcttttaaggaaccgcccgcccaaggctcactcctttatctttcctatcctttcaggctattgagggcacctacattgacaagaaatgccccttcactggtaatgtgtccattcgagggcggatcctctctggtaagtgcgggagttactggtgtctggggcctgaaatactgaaagaagggtcttggggcccagactcctgggtcctgggtgagaggggtggttaggaatgcaaacttgtaggtccaggtacattggcagatgatgtttgttttcacgatggtcttcagatgcccacgtgggcactgctgagaaagccacttggtaaaactgatgccggaaatggggctttttgggatccctgctcagctgcttctgagtcccagcatgccctgggttacctatggccctctttcccatgggacctgacctatgatcggcccccgctcctaggcgtggtgaccaagatgaagatgcagaggaccattgtcatccgccgagactatctgcactacatccgcaagtacaaccgcttcgagaagcgccacaagaacatgtctgtacacctgtccccctgcttcaggtgagcgcagtggcccatcaggttgctcaggccacgctctctcagccttcagattccagatcggaccaatttaaggccaactgagggagggaaagactgaggtggcatctctgggaagccccagaatctcaggatttgtatatcatatgttcttcagaatcaaagcgttctacagggtgaatatctctacctgaaatgcttggaaccagattttggaatgttctcgcatacatagtgagatgttttggggatgtgacataggtctaaacaagaagctcatttgtttcatatacaccttattcacatagcctgaaagtagtcttacgcagtgcgttttataattctgtgtgaaacaaagtttgcgtacattgaaccattggaaagcaaaggtgtcacgctggtattgaagaagtttcagattctagccaggcaccgtggctcaagccagtaatcccagcactgtaggaggctgaggcaggaggatcccttgagcccaggagtttgagaccagcctgggcaacatggcaaaaccctctctctacaaaaaatacaagtttgccaggtgtggtagcatgtgcctgtagtctcaggtcttcaggcggctggggtgggaggattgcttgagcccagaaagtggaggctgcagtgagccgagatggcagcactgctctccggcctgggcgacagagtaagaccctgtctctcccacacacacacaaattcagattttgcagcgtttcagaatttttggattagggtgctgaacctgtaataggcaggtgcgtttgaaccaaaaggttaggatgtcataccagatgggaacctcagaaatgttggaattaaacgtttgttcattccctcagcatgttttagttagagcttatcacgtaccaggtgtggtgtgagatgtttggggttcagtggtgagccaggaacaaagtcctgctccctcagagggcaccttcaagcagtgtgggtgccagatgacagccaagtataaccagaatggggatgtgggcagctgatattggtggccctctgggcggggaggatcttgggagcaaggtgaggagtcctgtgggtggagaggagggtggcccaaactgatgctgagcgataagggacctgtggttgtcagtgctgcaggatccccctgctgctctgctggggaagggtggtgaggctgctgacaacttgggggcctccagtttgcttgtgaaatggagctcgtccaccccagcggtcctcggaggggtggtggcctgctctgtgtacagcgttgagcttggtgcttggcacaaaacttgtacgaaaggaggggacaggttgaattggcgagtagagcttggttggggtttggtggagccgaagcagagagcctttagcctggtgaaggggagggagggcctcctggggtctgctggggtggcccctcctgaggacatggccctacctgcctccacagggacgtccagatcggtgacatcgtcacagtgggcgagtgccggcctctgagcaagacagtgcgcttcaacgtgctcaaggtcaccaaggctgccggcaccaagaagcagttccagaagttctgaggctggacatcggcccgctccccacaatgaaataaagttattttctcattcccaggccagacttgggatcttccgcgcctttaccagagcattggtgggggtgggggtgtgcctcggggaattgggcagagctgctgtcagagaggctgcctgcccatgtctgtgggtgaggacagtggagcctgaactgagatgcctgccttcccctgggtctccttctttggtccttgtcaccttttcggtgtctgaataaggctgattacctggcgttgcgctgtccccccgccccctccggtctctggggaggaagtgagtgacggcggaggcccctgggtcctccaggccctggtctgtctctttcctgaccacctcgggtggggaggggaagaagctgcagcccccccctgctgtgggcatgggctcacccaggtagagtgggatgtgctgaggccctgttgtctggctgtgaagtgtaaaggtcttggctttagcctgggcctcctatccctccttacagccaaggatgggggccccatgcacgcaccacacacgcctagttgggcaccaggcctatctgcagatgaggaaactcatctgggagaggccaagccctccacctgaagtcccagtgagtagctgagttacaggtctcagattctagaaacttcctctgcgccagctgcctcaaaatcgcagtaaggaaattggtggtgtgggcaagtggcatcatgaggctcccctggagcctgttcagtggtaccggggcccaggctgctgggaaggaagtgggcaggaagcgtccggagacggcccaacacacacaggccgcagagatgggggccttgagaggaacaggacaggacacacggtggcccagggttgtggcacatggggaggaggggttttgcagagctggggagagcacagaccaccgcgagaggcaggtacaatagaaacaggtgtactttgcgcatcacacagaggtggggacgacaggcatggggtgggggcggtgaggcaggagcgcaccagaggatatgtgggacccgaaggggagagacgcataaaagccgcagcagagatgggagtacagggaggggaggtcccaatgcccgctcacctcaccccttggggcctgccggtgccggggtccccaggtccctgtcccccaggcctgtaccagggtctgagcccagcactggtacaagggttgggagacagggccatggggagaggagccgccgctgccgctgctgcctcggggacgctgcctccccgtgggcccagtccctgccttatacccaggtccagggagggcgggggttcctgccagaggaagtggggccgcatcaaagagggcaggaaggggcagggacaggttggggggacgccaccctgagtcgcagaaactgcacacccactccaccctatgctgggggcagtagagaaccagcaaggggcaaagagggagtgtggactccagagggaggggacggagacccagaggggaataggaggttgcggccccctcccctcagccgcaggtgtttccgttcgggtggggctgctgtgtttacaacaacagcccggctccccggtttcctccctgattgttggggcgtctccttggcaccccatcacgtcaggtggtgtgctgaggtcagagtgtgtgctggggaaggacctctgctgggcctgctggattgcaaagagcaagtttaaaagaccccctcggacctcttgacaggccttccacctgaagagtggggataaggaccataggttctttttatttttttatttttattttattttattttatttttgaggcagattcttgctctgtcgcccaggctggagtgcaatggcgcgatcttggttcaccgcaaccttcgcctcccaagttaaagcgaatctcctgcctctgtctcctaagtagttgggattacaggcatgcaccaccacacccagctaattttttaatttttagtagagacggggtttcaccatgttggccaggctggtcacgaactcctgacctcatgatccacccatattggcctcccaaagtgctgggattttacaggcgtgagccactgcaccctgcccacaggttatttgataacccaaggagatacagttcctaggtcagcgggttcccctgtctcccctcccacctgctctccctctcactcagccccacacccccagcacccaccagacctgctgttcctctgagcctcctcaccatctgttccctctatgtggaatactctgacctggagtttccacctggctccctccctcactctctttgtctttaattaagtgaatgaattaatttttttatttgttaattgtttatgaagagaaactatttcttagcccatatattcatgtgtcatcgttcaggaacaagtcagtgacaaacttctaggtaattcaacctgaagaaattctttatattccaagatcattgcactctgaaagataccagccttccagccaggtgcagtggctcatgcctgtaatcccagcactttgggaggcc[132 bp omitted]gaggcaggagaatcgcttgaacccgggcagtagaggttgcagtgagctgagatcgcgccactgcactccagtctgggtgacagagtgagactccatctcaaaaaaaaaaaaaaaaagataccagccttcctcatctcaaaatctttcatggaatcgtaatttctgtagaaatctgcatatgccttctttcttggttcagccacagcaaacatatagaaagctgcagcccccagggataccatggatgcttcaacaatatgaaatcacagacgcttggccagaaggccacacatctgaggctttggcaaaactttggaagccatggtagttactgtccttgataacgtatgtcagcctcaataccaacgtccttcctgactgatggaaaaatggatggtgaaggaatgaattatgtgaagttgccacattctggctggggggaccttgacccctaggcttcaggggctcaataactggaagcagtaaagctgagccagaggccccagaggtagcagagacccgccgaggctcttttccaacttctggccctgtagctccctagctgtgtgtgaccttggacaagagacccactcctccaccacagagcctcagtttcctaatctgtaaaatggcttcttgcctccctgccctattgggaggatcaatatgctcatgtgagccaggtcccgtggctcacggctgtaatcccagcactttgggaggttgaggcaggcggatcacttgaggtcaggagttcaagaccatcctggccaatgtggcgaaaccatgtctctactaaaaatacaaaaattagccagtgtgatagcgcgcacctgtagtcccagctactcaggaggctaaggcaggagaatcgcttgaacctgggaggcagaggttgcagtgagccgagacagcactccacctaagcagcagagggcgactcagtctcaaaaaaaaacaatgctcgtgtgtgataatgggacagaaccagtcctgattaagtgtacactggaaagtaacaatgccgggggccctcagcttggtgttggagaaaggcccatagtgtcatgttacagcatcctgtggggccccttgggcaggcttaaggaccagggcctctggcaggcagcccttgctgtaatggacccacggtttttattttaatatttgttgtatggttgcggaatcctggctccattacagcaagccctggtagtttgtcacgggatgttgagtctgttttagcatgcctctggaatattctgtcgaatacctattatagggggccccaatggccttgccttttcacaggaaagttagcttttatagtggggttctgggtttataatgatagcggtcaggccaggtgccggggctcacacctgtaatcccactacttagggaagccagggcaggaggatcgcttgagccaggagttagagaccagcccgagcaacaaagggagactcctgtctctatttaaaatatattaggccaggtgcggtggctcatgcctgtaatcccatcactttgggaggccaaggcaggtggatcacgagtcaggagttcgaagccagcctggtcaatatggtgaaaccccatctctactaaaaatacaaacattagccagatgtgtagcggtgcctgtagtcccagctactcgggaggctgaggcaggagaatcgcttgaacctgggaggcagaggatgcagtgagccaagatcacaccactgcattccagcctgggcgacagagtgagaccccatctcaaaaaaaaaaaaaattttgctgggtctgtagtcccagctactcgggaggctgaagcaggaggatcacttgagcccagaggtccgagtctatagcaggctaggatgacaccactgcactccagcctgggtgacagagtcagaccctgtctcaaagaaaaaaaaaagacaggcatcaaacctaccgtgtgaaaacagggcaggtcttgattatcttgtattgcggccctgcacctcctgcagcaggtcatgggtctgtgatattagagccggatggccatcattgctgcagcctcctgtgggctattataatactaagtaaggccttgggctcctgtgacaggccctgctgatattacatggttgcaatactcaggttaaattataggccagc[139 bp omitted]aaccccgtctttactaaaaatacaaaatttagctgggcgtggtggtgggcgcctgtagtcccagctactcgggaggctgaggcaggagaatcgcttgaacccgggaggcgaaggttgcagtgagccgagattgcaccactgtgctccagcctggtgacagagcgagactctgtctaaaaaaaaaaaaaaaaaaaaaaaagttatttatataggaggcacctgagctcattgaactagtcccaaggtgtgtgagtggagtctggaaattgaattggagtgtgttccaggagtagttaagcagacccactgccgagtgtcagcactaccctgagcccaacaggaattcctgggtctaacactgtagtaggtcctggctctattacgtattatagcaagacaggccaggcacagtggctcagactgcaatcccagcactttgggaggccaagatgggaggctctcttgagcccagcagtttgagaccagcctaggcaacataggaagaccccatctctacaaaaaaaacttaaaaattagccaggtgtggtggtacgtacctgtagtaccagcgactcgggaggctgaggtgggaggatcgcttcagcctgggaggtcgaggctgcagtgagctattatcatgccactgcattccagcctgggtgacagagtgagaccctgtctcaagaaaaaaagtaaaaataaaagaccgatggatgtttcagaggtcagtatagatttagctagaacattctagcagaacaccaacgatgttctagatgagtttgaggaacacatcaagccttcccagggacattcattctacaaatgtttattgcgctgttccccagggatggctgcaagagtgagcaagacagctccagccagagcctggtgtcagagcctgcaatccagtgggatccctgggggcccagcctggctgcggagtgggggcgttaacaggaaccgggggctactatggacgccctgtgtgccacgtggagcctttggcc[144 bp omitted]tactaaaaaaaaaaaattagccaggagtgatggcaggtgcctgtagtcccagctactcaggaggctgaagcaggagaatggcgttaacccgggaggcggagcttgcagtgagccgagatcgcaccactgcactccagcctgggtgacagacagagactccgtctcaaaaaaaaaaaaaaaaaagaaataggttggtgcaaaagcaattgtggttttttgtttgttgtttgtttgtttttgagtctcactctgttgcccaggctggagtgcagtggcacaatctcatctcactgcaacctctgcctcccaggttcaagcgattctcctgcctcaccctcccaagtagctgagattacaggtgcccactaccatgtctggctaatttttgtatttgtaatag[138 bp omitted]agtcttgctctgtcacccagactgaagtgcagtggcacaatctcggctcattgtaacttccgcctcccaggttcaagcgattctcctgcctcagcctcccaagtagctgggactattcagcgagtgccaccatgcctggctaatttttgtatttttagtagagacagggtttcaccatgttggccaggctggtctggaactcctgacctcgtgatccgtctgcctcggccttccaaagtgctgggattataggcgtgagccaccgtgcccggcctgcaattggggttttaatggcagaaaccgcaattacttttgcaccaccctaatataaagacacaattattatccccattttccagataaagaacctttggctgggagaggtgtacctggaagagtcgtgttttggttttgaactcaggtgtgattgccccccaggtcagtagggggcactattgtgtaagggtggagaggaggggcagcggttaggtggttcagggtgcacagctcaaagctgcctggggccattctaggcacagaggcaggggccagggccggctttaaggccagctcctcgtgcagtctgaggagtggatcagaagggaccagcacctggtgagtgctctacttgaaccatcttgaaactggaaccaaggggaccacatttttgttttatgctgagtgtgtcctgccatgggcttttcctttcccttccccttctccttcccctcccccttccccttcccctctcctcttctcttctcttccgttttttggagacggagtcttgctctgtcgcccaggctggagttcaatagcgcaatctcggcttactgcaacctccgcctcctgggttcgagtgattctcctgcctcagcctcccgagtagctgggattacaggtgcgcactaccacgtccggctaatttttgtatttctagtagagacggggtttcacca[138 bp omitted]ttttttttttttttgagacagggtcacactctgtcgcccaggctggagcacagtggcgcgatctcggctcactgaaacctctgcctcccaggttcaagcgattctcctgcctcagcctcctgagtatctaggattacaggcacaggccaccaggcccagcgaatttttgcaccatagagatggtgtttcgtcatgttggccaggctggtctcgaactcctgacctcagatgatctgctcgccttggcctcccaaagtgctgggattacaggcatgagccaccgcgcccggccttgccaggggctttctactgcactatagtgtggacttcaggacattgtagctgtcctgggggagcccaggtgacagtctaagggggttctaatagagccctggggacatgacagcaggatcccagggggagagagggtgtagtcagggctcattagaacagagccctgaggatctgatgcaagtcaaccagctgatgctataaatgggctccagagacattgcaggaacccagggcatctgcaagggtttcccaggtggcactaagggaccttgaggcctttttctttttctttttctttttctttagggtctcgctcagtcatccaggttggagtgctgtgatgcaatcatggctcactgcaacgttgactgagacctttttcttccgtgacaggaaggagggctatgatggggaatgtctaggcagacccctgggaggcctcctggttaaagccccaggccattacaacagcaaggagaggagatcagaatggggcaaggaaagacactccagatgaccacggccagctgaatcatggcctcagagacgtccatgccctaatcccccaaaacctctggctgtggccttatatgggaaaagggactttgtgatgtgattaggttaggttcagatggggagacgatctcggattatccaagtagccctaaacataatcacaggactcctttggagagggaggcaggcgggttggtgtcggagagagaagacgtgaggaccgacatatgggtcagagaggggagaggatgccgtgctgctggccttgaagatggaggactgggccatgagccaaggaatgctggtagcttctagaagctgggaaaggcaaaaacaccgattcttccctggagcctcc[141 bp omitted]caaaaattagccgggtgtggtggcgggtgcctgtaatcccagctactcaggaggctgaggcaggagaatctcttgaacccgggaggcggaggttgcagtgagccgagttcgcaccagtgcactccaagctgggcaacagagccagactccatctaaaaaaaaaaaaaaaaaggaacacaaaacctgtgagtatcataggtggtccaaggagctttacgaatgtcctggtaatgttacagcagggccctgggggtggggacgtgagagctaaggctgggttatagaggaccccacagtgatggtagtcagacttccaggaaaagcatagcaggctcctgagggacactgtaacagggcattgaggattctgtcagggtccaaggaaccttaaaatggggcccaggggctgctggaatagtgtcctgaagacattacatgatcccaaggaaactagaggggacagctaaggacagggcagttgcctcagggtattttggggaagagctgagggtgctgtaattaggattcttaagaaattaaagcaggtggccaggc[138 bp omitted]tggcaggctcacgtagtcccagttactcgggaggctgaggcaggagaatggcgtgaacctgggaggcgcagcttgcagtgagccgagactgcaccactgccctccagcctgggcgacagagcaagactctgtctcaaaaaataaaaaaaagaaaagaaaagaagaaaagaagaagttaaagcaggttctttctgtctcttaggagtggaccttgggatgggtgtcactggatctcccttctagtaggacacagggagaatcaggtaggacacagtaggacacaggcagaatgagaaaaatgaagacattctggacaaggagaacagagatttacctggttaattttatgtgtcaatttggctgagccacagtgagtgaagagatattcggtcaacattattctggatgtctctatgagggtgttttaggatgagatttacatatatatttgtgagacagggtcttgctgctgcccaggctggagtgcagtggcgccatcacggctcactgcagcctccaactcttgggctcaaggggtcccccagcttcagcctcttgagtagctgggaccacaagtgcgcaccaccacacccggctaatattttaattttttgtagagataagctctctctgttactcaggctggtccttgaactcaagcgatcctcctgccttggcctaccaaagtgctgggattacaggcatgagccactgtgcccagctgagatttatgtttagattgttaggctttgagtaaaggaggttccccttcctgaattgagggaggctcatccaaccacttgaaaccctgaatagaagaaaagtctcggctgggtgcggtggctcacgcctataatcccagcactttggaaggctgaggcgggcagatcacgaggtcaagagatcgaggccatcctggccaacatggtgaaatccccgtctctactaaaaatacaaaaattaaccgggtgtggtggcaggtgcctgtaatcccagctacttgggaggctgaggcaggagaatcgcttgaacccgggaggcggaggttgcagtgagccaagatcgggccattgcgctccagcctgatggcagagcgagactgcgtctcaaaaaaaaaaaaaagaagaaaagtctgcccagagggagagggagtcctgctaggcaattgtgtctcccacctgctggctcccccattagactttggggtttctttctttctttctttcttttttttgagatggagtcttgctctgtcgcccaggctggagggcagtggcgggatctcagctcactgcaagctccgcctcccgggttcacgccattctcttgcctcagcctcctgagtaactgggactacaggcgcctgccaccatgcctcgctaatttttttatatttttagtagggatggggtttcaccatgacctcgtgatctgcccgccttggcctcccaaagtgctgggattacaggcttgagccaccgcgtccaacatttttgaaattttttttaaaaatagagacagggtctccctatgttggccaggttggtctcaaactcctggactcaagcgatcctcccaacttggcctcccaaagtgctgggatgacaggcatgcaccaccacacctggcccccgcatcagactctgaaccagctgaacgtccactaatcctggaagccaattcctcaaatgaatctctttctgtgtatgcatatacacattctgtggattctgtttctctagagaacctgaactacctgaccagcagttccactcccagatgtatgctcaatagagctgaaaacaggccaggcatgggtgtcttgcacctgtcatcccagtgctttgggaggccaaggtgggaggctgtcttgagcccagcagtttgagaccagcctgggaaacatagcaagacactatctctgcaaaaatacaaaaattagctgggcctggtggcaagtgtgtgtaattccagctccttgagaggctaaggcaggtggagtgcttgagcttgggaggttgaggctgcagtgagccatgatcgctccacggcattctagcttgagtgacagagccagaccctgtcaaaaaaaaggaaaggaaggaaggaaggaaggaaggaaggaaggaaggaaggaaggaaggaaggaggcaaggaaggaaggaggcaaggaaggaaggaaggaaggaggcaaggaaggaaggaaggaaagacttcatattatatgattcaatttctttgaaatgtgcagaataggcaaatctatcaagacagaaagcagatgaatggttgccaggggtctgggagcagcggctgtttaacggggacagaccttctgtttggggtgataaaaaagctctggaactcggatagaggtgacagttgcacagcactgtaaatgtgttaaatgacagtaagggtaaatattttgaatattttaccacaatgaaataagtgtatgggaagctttgtagcaggagtgtgggcgggggctggtgcctggaggggccttcgagtgaggcagcattgtatggggaccatgtggtcactgaagtcctagcagaaggatgtggtttttttttttttttgagacggagtctcgctctgttgccagtctggagtgcagtggtgcaatctcggctcactgcgacctccacctcccgggttcaagcaattctcctgtctcagcctcccgagtagctgggaccacaggcccaccaccacgctcagctaatttttgtattattagtagagacgggggtgtcacc[133 bp omitted]tttaaggggatgccgggggaagggcttgaaggaggaactaaggaggcttccagaagattttgattaacagcgagcgctagggaaggccacggggatacagaggggtaggaggaggatccagagacctccaagttgtggactccggaggcatcgagttcctttcccagttttgtcaagaattccctgagcggcagacaccctcaaagtaaaaaacgggaaccacagagaaggaaaaagaagaaccacaagcgttttgagaaacaaacaggctgggcctagggcctggggtgtgccctgcaactggggggtggggctggatgttcttggagtcagggagcagcagcctcccacaggatgtgagagaggaactggggtctccagtcacgggagccaggagccggccagggccgcaggcaggaagggagcgaggctgaagggaacgtgagccgaccagggcccgactgagggaggaggggctgggggcctggaaccctgggtctgagggaggagtggctgggggtctcgacactgggtctgagggaggaggggtgggggcctggattcctgggtctgagagaggagggactgggggtctggacgctgggtctgagggaggagggaggaggggccgggggggcctggactcctgggtccgagggaggaggggttgggggcccggactcctgggtccgagggtagagcggttgggggcccggactcctgggtccgagggtagagcggttgggggcccggactcctgggtccgagggaagagcggttgggggcctggactccggggtctgagggaggaggggctggggcctgaggggggcggaaggggcgtggcggagctcggggccgggactctcagcctatcaagtgtctgtaattaattaaccaactgagatccagttcaggggtgaaagttcttcaggtacgaggagggcattgttgtcagtctggaccgagcccgcagagcccctcctcggcgtcctggtcccggccgtgcccgcggtgtcccgggaggaaggggcgggccgggggtcgggaggagtcacgtgccccctcccgccccaggtcgtcctctcagcatgggggtcccgcggcctcagccctgggcgctggggctcctgctctttctccttcctgggagcctgggcgcaggtgagggccgctccgggccagggccctgctgcaggcgggcggcgggaggcggccccaggcaggcaggggcgaagccagcgggacccgagttccccgcgagcccctggcgctgccttctccgctcaattaactttctcaacgtctcctgctgggcctgaggctgggaaccacctgtcgcctcttgtgtctgtttccctctctctctctgggtctctgtccccctctctttctgggtctcttgtctctctctctctgggtctctgtccccccccccccgggtttctgtcccctctctctgaatctgtccccctccctccataatagattcttctccctccctgggtatctgtcccactgcagtctagttccccgcccgtgtgctcccttcagctctgtttctgtctgcagaaagccacctctccctcctgtaccaccttaccgcggtgtcctcgcctgccccggggactcctgccttctgggtgtccggctggctgggcccgcagcagtacctgagctacaatagcctgcggggcgaggcggagccctgtggagcttgggtctgggaaaaccaggtgtcctggtattgggagaaagagaccacagatctgaggatcaaggagaagctctttctggaagctttcaaagctttggggggaaaaggtgagattccggtctggaggggcaaggggccgggtccatgctccggggccccgcttacctgtgtttgggcgccccaggtccctacactctgcagggcctgctgggctgtgaactgggccctgacaacacctcggtgcccaccgccaagttcgccctgaacggcgaggagttcatgaatttcgacctcaagcagggcacctggggtggggactggcccgaggccctggctatcagtcagcggtggcagcagcaggacaaggcggccaacaaggagctcaccttcctgctattctcctgcccgcaccgcctgcgggagcacctggagaggggccgcggaaacctggagtggaagggtgagccggatctgcagccgcaggctgttctgtcctctctcccgtcatgcccacctgcctcagttcccctgccaggaccctccatcagcctcccactgcagcccacgctctgcccccccattcctcaggggtccttctacactcagccctcccatggctccccagcgccccccaggacaaactcctggcttccttccttgccttctttttttttttttttttgtgagacggagtttcgctcttgttgcccaggctggagtgtaatggcgcgatctcggctcaccacaacctccgcctcccgggttcaagtgatctcctgcctcagcctcccgagtggctgggattacaggcatgcaccaccatgcccggctaattttgtatttttagtagagacggggtttcttcatgttggtcaggctggtctcaaacccctgacctcaggtgatccgcccacctcagcctcccaaagtgctgggattacaggcatgagctactgctcctggctccccccttttttttttttttgagacagattctcgctctgtcaccccaggctggaatgtggtggcaccatctcggctcactgcagcctgaacctcccaggctcaagcagtcctcccacctcagccaaccaagtagctgggaccacagcccagcatcatcacacctggctaactttatattttgtagacacggtgtctcactatgttgcccaggctggtcttgaactcctaggctccagcgattctcctgctttggtctcctgagtagctgagattacaggtgcataccaccataactggctaatttttttttttccgcacaatctctgttgcccaggctagtgtgaagcagggtgatctcagctcgctgcaacctccgcctcctgggtttaagggattccgctgcttcagcctcatgagtagctggcactataggcacatccaccatgtctggctaatttttatacttttagtagagatggggtttcgtcatggtagctaggctggtctcaaactcttgacctcaagtgatccacccacctccgcctcccaaagtgctgggattacaggagtgagctaccgcgtctggccatacctggctaatttttaaaatttgttgtagaggtggcatctcactatgctgcccaggccagactcaaactcctggcctcaagtgattctctcactttggcctcccagggtgctgggatgacaggtgtgagccactgtgcttggccttccttgccttaatgtcctcatcagacccacgcagcagcacttgtctctacgcagccatcagagtctacgctccagccacccaacataagcaatctcctccctctgggcatttgctcatccagtttcccctggcacctctctgttccacccttccccctctctgcatatactccagccctccttattcttcaaggtcagggctggatatcacttcctctgagaagcctttcctcagctctgtagggcagagttcactgtttcctccccggaggcccccagatccccactcattcaactgttggccaagagcatttgcactgccaggcgctgctctgggccttgagcaaagagggaagtgacacacattcaccctctgtggctcccaggctgctggacaaagatagataccagctggggatgtgcacagatattcattccaagtgccacaaaggagaagttgagactcaaccaggtagtttttctttaattgtcttctttctttcctaagtagggaaaatttctttctttttttgagacagagtttcgctcttgtcgcccaggctggagtgcaatggcgcgatctcggctcactgcaacctccgcctcccaggttcaagtgattctcctgcctcagcctcccgagtagctgggactacaggcgtgcaccaccacgcctggctaatttttgtttgtttttttttttttagtaaagacagggttttaccatgttggccgggatggtctcgatcttttgacctcgtgatctgcctgcctcggcctcccaaagtgctggaattacagacgtgagccactgctcctggcctttgttgttgttgttgttgtttttgagacagactcttgcactgtcgcccagactgcagtactgtggcgcaatcttggctcactgcaacctccgcctcccaggttcaagcaattctcctacctcagcctcccgagtagctgggattacaggcacacaccaccatgcctggctaatttttgtatttttagtagagacgggggcttcaccatgctggccaggctggtctcgaactcctgatctcgtgatctgcctaccttggcctcccaaagtgctgggattacaggcatgagccaccactcctggcttaaggagggaaagtttcaaaccacacttaagtagaaacaatagtataaaacggaccagacacggtggctcacgcctataatcccagaactttgggaggccgaggcaggtggattgcttgatcccaggagttcaagaccagcctgggcaacatagtaagaccgcatctctactaaaaactcaaaaaattagcctggcatggtggtatgtgcctctagtcccagccactggggaggctatggcaggaggatcgcttgagctcaggagtttgaggctgtagtgaactgattgcaactctgcactccagcccagatgacagagccagaccctgtctcaaaaagaaaaaaaatatggtggccaggtgcagtggctcacgcctgtaattccaacactttgggaggccgaggtgggcagatcacttaaggtcaggagtttgagataagcctggccaacagagtgaaaccccatctctactaaacatacaaaaattagccgggtgcggtggtgggtgcttgtaattccagctattcgggaggctgaggcaggagaatcacttgatcccgggaagcagaggttgcagtgagccgagatcaagccactgcactccagcctgggcaacaaagcaagactctgtctcaaagaaagaaggaaagaaagagagaggagagggagagagaaagaggaaggaaaggaaggaaggaaggaaggaagcgagcatcccatcactgagacttaataattatcaacccatggttttttgaatttcacgcacatcctcactcacttccccaccccacttcacatcaagctttggtaaatctcagacatcacagtgtttttttctttgtttgtttgtattttgagatggagtctcactctgtcatgcgggagtgtagtggctcagtctcggctcactgcaagcttcgcctcccaggttcaaacaattctcctgcctcagcctcctgagtagctgggattacaggtgcccgccacctcgcccagccaatttttgtatttttagtagagatgaggtttcaccatattggccaggctggtcttgaactcctgacctcgtgatccacccaccttggcctcccaaagtgctgggattacaggcataagccaccgcgcctggccaatttttgtatttttagtagagacgggatttcactatgttggccaggctggtctcgaaccctccacctcaagtgatctgccctcctcagcctcccaaagtgcgggagtcaccgtgcccagccagactgttttgttgataagtcctttagtatgtaactctactaggtaagggcatttaaaaaaaattaataccaaaaccatcatcacacctacaaccaattaactctttaatggcatcagatgtccagtttttgttcccatattcctgactgtaaatgttttttaaagtttgaatcagcatccagcaaggtccacacattttgttgtcttttcagtgtctttttctgattgttgaatttttctttctttctttttttttttttttttcctttttgagacagggtcttgctctgtcaccagactggagtccagtggtgcaatcatagctcactgcagtctgaacttcctgggctcaagtaattctcccacttcagcctccccagtaggtaggaccacaggtgcacgccatcaggcctagctatttttgtttgtttgttttttgagacaaagtcttactctgtcgcccagactggagtgcagaggcacgaactcggctcactgcaacttctgcctcccgggttcaagcaattctcctgcctcagcgtcccaagtagctgggattacaggcgcaagccaccacgccctgctaattttttgtatctttagtagagacagagtttca[144 bp omitted]ctgtcacccaggctggggtgcagtggcgcgatctcagctcattgcaacctccacctcccaagttgcaccaattctcctgcctcagcctcccgagtggctgggactacaggcgcccaccaccacgcccggctaattttttgtatttttagtagagacagagtttcactgtgttaggcaggatggtctcgatctcctgacctcctgatccgcctgcctcagcctcccaaagtactgggattacaggcttgagccaccgcgcccggccggattccaattttttaccagataggtgttttgcaaatatttcttccactctctaggttgtcttttcattgttttaactgtgcctttcacaaagcaaaagtttttaactttgatgaaatccagtttattcttttttttttttctatcgtggattatgcttttggtgtttaatctcagaagtaatcaccaaacccaaagtcagctagatcttctcctgtgtattttaagagttttaaagttttgcattttacagttaggtctgtgattcattttcaggtaatttgagttacttgtgatcttgagtgtcttttgatttacaggtttcccattttctttttgttttttttccccctgtaattgtggtttgaagaaagtcagtttatgtcctattgagtttctcctagactggattttgccctttgcatcctgtgatgttgctggaaatagtcctccttctcttctttaaaggagcagctccatctagaagcttggtcagattctggttcaatttttatggcaagaaaactttctgggtagttggtgcgtatgtctgtgtgcataggctgcaaacatctgcttgcttctgtgctgttctgtggaccactggattcgggtgttgttatgaagttctttgtcaggttttctcctgatggttttagcggatagcaatggccattgccttaatcttttttttttttttttttttttgagatggagtcttgctctgtcgcccaggctggagtgcagtgttgcgatcttggctcactgcaacctccgcctcccaggttcaagcgattctgctgcctcagcctcctgagtagctgggattacaggtgcgtgccaccatgcctggctaatttttgtattttttttggagagatggggtt[145 bp omitted]aggctggagtgcagtagcacgatctcggctcactgcaacctccacctcccaggttcaagtgatcctcctgcctcagcctccttagtagctggaattacaggcacacaccaccacacccagctaatttttgtatttttagtacagacagggtttcaccatgttggccaggatggattttttttttttttttgagatggagtttcactcttattgcgcaggctggagtacaatggcatgatctcagctcactgcaacctccgcctcctggattcaagtgatcctcctgcctcagcctccagggtagctgggactacaggcatgcgctgccatgcctagctaatttttatatgtttagtagagatggagtttcaccatgttggcgaagctggtcttgaactcctgacatcaggtgatctgcctgcctcagcctcccaaagtgctggggttacagacgtgagccaccatgcctgacctggtttggtattttgttaaacagaaccaaaggccagacagattttctgtgcttggatttagtctatattggaagtaccttgaggctgaaggcacgtggctgtgagcacgacacaggaagatacagatttgctgaaaagaatagtgaacataaagcagaagccagaactgctgatggccgtcagcccggtccctccattccacctgacggtgcagcaaattctgccgacttgccagagaggcagctccaggagggagaagctgctgtgctttcctgaagcagcaaatgtgttttctgctgagcaaccaaaaccaagatcccagccaagacccacgattgcccagatccaccctccctgaaaggaacttgggcagtaatgcccagtcctaggcagttgctgaaatctttgccttttattttcttttttgagctgggatcttgctctgtcgcccagactggagtggagtgcagtggcacagtcatagcgccatgtagccttggactcccaagctcaagagatcctcccgcctcagccttacaagtagctgggactataggtacacgtcaccatgcctggctaacattttctattttttgtagagatggggta[132 bp omitted]tggtgaaaccctgtttctactaaaaatagaaaaattagctgggcgtggtggtgtgcgcctgtaatcccagctactctggaggctgaggcaggagaatcgcttgaccccaggaggcggaggttgcagtgacccaagattgtgccactgtactccagcctgggcgacagagactccgtctcaaaaaaaaaaaaaaaaaaaggaaaagaaagcctgggcgtaaggatccttctgccttgacctcccaagtgctggaattgcaggcatgagccattgcacccggcttttttttttttttttctttgagacaggcacttgcactgttgcctagactggagtgcagtagcgggattagagttcactgcagcctcaacctcccaagctcaagcgatcctcccaccttacccttcctgaatggatggggccacaggtgtgtaccatcacacgtagttaatttttaaactttttcagagacggggtttctccatgttgcccaggctggtcttgaactcccggcttccagtgatcctcctgcctcagcttcccaaagtgctgggattacaggcatgaaccactgcacccaaccttttttcattcccttaacgaaacctttggatgaacaaaaattcttaatttcagtgaagttcagtttatcgacttcaatttatacattttataaagtttatgaatttttttttttttttttagacggagtcttgctctgtcgcccaggctggagtgcagtggctatacccaggtgtgatcataactcactccagcctcaaactcctgggctcaaggattcctcctgcctcagtctccagagtaggtgggaccacaggcacatccaccacactggctaattttttttatttgtagtggagactacgtcttactgtttgcccaggctggtctccaactcctgggttcaagtgatccacctcattctcccaaagcgctgggattgtaggagtgagccactgcacccagcctgtctgctaatattatgtttaagagttctgaatctttttttaaattttttaaaatttttaattttttattttttttgagacagtcttgctctgtcgcccaggctggagtgcaatggtgcaatcttggctcaatgcaacctccgccttctgggttcaagcgattctcctgccttagcctcctgagtagctgggattacaggtacacgccaccatgcctggctaatttttttgtatttttagtagagatgggatttcaccatgttggtcaggctggtctcgacctcctgacctcgtgatcctcctgcctccaccccccaaagcgccaggattctaggtgtgagccaccacacctgtcctgaatctatatttatgagagacattggccttaagctctctttttttttttttttttttttttttgagatggagtctcgctctgtcacccaggctggagtgcagtggcgcaatctcggctcactgcaagctccgcctcccgggttcacgccattctcctgcctcagcctcccaagtggctgggactacaggcgccggccaccacgcccggctaattttttgtatttttagtagagatggggtt[145 bp omitted]tgacctcataaaatatgctgggagagtgtttcctctgttttatggcctgaagagttagtgtaggaatagaatcatttctacattggaagaattcactaattgatgtcttctggacctggaattttagtttttggaaagttttaaactatggattaaaaattttaaataggccgggtgtggtgcatcatgcctgtaatcccagcactttgggaggctgaggcaggtagatcacaatgtcaggaatttgagaccagcctggccaatatggtgaaacaccgtctctactaaaaataaaaaaattacccggcatggtggtgcatgcacctgtagtcccagccactcgggaggctgtggaagaagaaactcttgaacccaggaagtgggggttgcagtgagtcgagatcgtgccactgcactccagcctgggtgacagagcgagactcttatctcaaaaacaaaaggctaggcgtggtggctcacacctgtaatcccaacactttgggaggcc[134 bp omitted]gaggcaggagaatggcgtgaacccaggaggcggagcttgcagtgagccgagatcgcgccactgcactccagcctgggagacagagcaagattccatctcaaaaaaaaaaaaaaaatttaaatagttataggactacagacgttttaaatttcctcttgtgtcagtttagaaggttgtatttatcaggaatgtgttcagttcatctaaattttcaaatgtgttgctgtggaatttttcataattatcctctatctttttttttttttctttttttctgagacggggtctcactctgtcgcccaggctggagtgcagtggcacgatcctggctcactgcaacatctgcctcccaggttcaagcaattctcctgcctcagcctcctgagtagctgggactacaggtgcccggctaatttttgtatttttagtagagatggggtttcaccatgttggccagtgtggtctcgaactcctgacctcaggtgatccacccactttggcctcccaaagtgttgcgattacaggcgtgagccaacatgcccagcccaaggaggtgacatcttgaggggacaccttcggggtggacaggttgagtctctgtcacctaggaagtgcctccccttttaccactgtattatctgcggttagcacagtgcaaacatggaggcctctttctgtccctatccagccctggctctgggagtggtgggctcgcgacttaggcctgtctgcctgatttcctgcagagcccccctccatgcgcctgaaggcccgacccagcagccctggcttttccgtgcttacctgcagcgccttctccttctaccctccggagctgcaacttcggttcctgcggaatgggctggccgctggcaccggccagggtgacttcggccccaacagtgacggatccttccacgcctcgtcgtcactaacagtcaaaagtggcgatgagcaccactactgctgcattgtgcagcacgcggggctggcgcagcccctcagggtggagctgggtgaggtcccgccaggtggtgatgctcctggtttcccgttgccttgtctcactgctgcgccggtccttcctgagtctgaccttcctccccactgctgccacctccttgaatctgactgccttgaacctcacgcctgtcagtgcccccaaaacctgatggcttgtccttcccaaggccaactgccttccgtctcctgctgcttctggcctcactgagtctgaagagctgttaactaccatggccagtcctccctgagtctgaccatcttccatcctgctgctgctgctgctgctgctgcgggtcttcctggaatctgaccattcgttgtctgctatgcccgtcctcaccaagactgactgcctgctgctttgctactgcccgggcccatgagactgacttcccactgctctgcctgcctctccccactgcactggcacagccccgccttgccgctgctgatccattgccggtgtgaccgcggccgctcgtgctgtagctggttcttacgtccaacctgggggcagtctgcccagatcgcctgcctggcctcgcctctgcccatcagacacttggtgctggaatctccgaggctgggagggactgggagcgccccagttctgtgtcctgactgggtggggtggaggggctgctccacatctcacagcgttctctggctgcagaatctccagccaagtcctccgtgctcgtggtgggaatcgtcatcggtgtcttgctactcacggcagcggctgtaggaggagctctgttgtggagaaggatgaggagtgggctgccaggtggggggcagcgggaggaagagcctctgagagagggacagagaccccaagagaggggcacacagacctgggaggacagagacccagagaggggggacagagatcagagagaggtggagacagaaacccagagatgggagaacagaggtgcagagagagggggacggagacagagacccagagacgggggaacagagacccagaggggacagagagaggtgcggacagagggagggggagacagacccagaggagggaggcaaagatgtagaaagaggggggacggaaaattgggagaaggggagacaaaggcccagaaggaaggggatagagactgaggaagagtgtgtgagacacacacacaaatgggggacgccagtcagacccagagcgcctcagagattctgatgacctctccctctctctctctcctcagccccttggatctcccttcgtggagacgacaccggggtcctcctgcccaccccaggggaggcccaggatgctgatttgaaggatgtaaatgtgattccagccaccgcctgaccatccgccattccgactgctaaaagcgaatgtagtcaggcccctttcatgctgtgagacctcctggaacactggcatctctgagcctccagaaggggttctgggcctagttgtcctccctctggagccccgtcctgtggtctgcctcagtttcccctcctaatacatatggctgttttccacctcgataatataacacgagtttgggcccgaatcagtgtgttctcatcatttttcaggcaggggaggtaagggaataagtcgggggactgaatggcggctgggcctcggatctctcctacaggtaacatgctgccacaggggaacctgccagttttatacatcaggtcatgtattttctttttctttttcttttttctttttttttagacggagtcttgctctgttgctcagtccggagtcctgtggcgcgatctcggctcactgtaagctccgcctccctgggttcacgccattctcctgcctcaggctcccgagtagctgggactacaggcgcctgccac[131 bp omitted]caccgcgcccggcctaaggtcactttttttttttttttttaagacagagttttgctcttgttgctcagactggagtacaattgcgtgatctcagctcactgcaacctccgcctcccaggttcaagcaattctcctgcctcccaagtagctgggattacaggcatgcaccaccacacccggctaattttttgtatttagtagagacggggtttcaccatgttggtcaggctggtctggaactcctgacctcaggtgatccacctgcctcagcttcccaaagttctgggattacaggcattgagctactgtgctcaacctgaggtcatgtatttttaattcataacttttacaaatatttactggatgactgccatgccaggcattttgaggaattcttggctactgtctgaccacctgaatccttggagccgaagaggagcgaggagcagtgttcactcttggaggaaatgggatatttcctccggccccttgattctgctctcccttttcttttcttttcttttctttctttttttttttgagacggagtttcgctcttgttgcccaggctggaatgcaatggtgcgatctcggctcaccacaacctccgcctcccaggttcaagcaattctcctgcctcagcctcccaaagtagctgggattaaagacatgcgccaccacacccggctaattttgtatgtttagtagagatggggtttctccgtgttgatcaggctggtctcgaactcccgacctcaggcgatccgcccgcctcggcctcccaaagttctgggattacaggcgtgagccaccgcgcccggccttttttcttttctttcgttctttttgtttatttttgttttgttttgttttgtttggtatagaagtgttggaacgtacacctctttcttaaaccatcctgacaaagggaaagggaaaaatacatttcccgtgaggcgttgtgactagaacagctggaggtggacggcagagtgccgcgacgactgccaggagttgtagttctccccggccgcgtcactgcggtgtcgcccacccttcttccccgggcaggccgcggtttcctttgtggacgtggcgaggagtgcccgcggcaccccgtgcactcattggccccgccccgtgagacgctcgtgcgagctcattgggcggggggcggggctctgcgctgccagaggcggggcctgactggagagcggccgaattgggcacatttgcgggaacgcagagcggagcgtggagagcggagcgaagctggataacagggtaaagggagtgggtggggggcctctgtccagggagggcggctcgggtcgaggaccagggtccggactgggagcaatgacggggagcctgcctgacctctcgctggccacaactatgccctgcaccttgcgtgggatgtgcgccacgtctgtctctgtaattccccctggcaggtctgggacccccctgagactccgtcagaagattcggtcctccccataggtggctttacctctaagcatcccgccctcttttcccccatcgcccgccctttttgagcccgaaagcttgcagccaacttccaactccctgtcctgtcctaggtaacccctccaccccgccattctcctatcccgtgtctgtccccatccctgtgacccctgacccctggcctttgccactccccagggaccgatgatgtggcgaccatcagttctgctgcttctgttgctactgaggcacggggcccaggggaagccatccccagacgcaggccctcatggccaggggagggtgcaccaggcggcccccctgagcgacgctccccatgatgacgcccacgggaacttccagtacgaccatgaggctttcctgggacgggaagtggccaaggaattcgaccaactcaccccagaggaaagccaggcccgtctggggtaagagagacattcggttggggcgtgtccagaggtggggcttaggagagagacgcgggggtatcgacaggggtcagagaaatggcgtggactgaacttcatttctttgtgagaaatgaaattctaccttctatccttgggaaaaagaaattaagttaaaattgaggcctaaagaggacctttgagaccgggcgtggtggctcatgcctgtaatcccagcactttgggaggccaaggcaggccgatcacttgaggtcaggagttcgagaacagcctggccaacatggtgaaatcccgtctctactaaaaatacaaaattaggcaggcgtggtggtgggcacctgtaatcccagctactcgggaggctgaggcaggagaatcgcttgaacctgggaggtggaggttgcagtgagccaaaattgcaccactgccctccagtcagggcgacaaagtgagactccgtctaaaaaacaacaacaacaataaaaaagaggacctttgagggcagcaaaatctgggttagattctgccccctaagcgctccttattcttttgtcccagacatctcccctccccaagcctcagtttcctgctctgtaaatggcagggactggtgtggaaaatgaggtttggcctttaaggagcccggccagtgcaggagagtggcagagccctgagtttcagggtgagctgggtggaatggagccctgtccaccctctccgtccaggcctgagcgcaggggggcgcgatgggagcagccgccttcttctgtgcatcctcctgacactgattgagcctgcaaaggtttatcgagcacctgctatgtgccaggcactgctctaggtgctgaagtcacaacagctaacacatctgtcctcctgaagtttacactgtggtgagggaaacagcaagaagtcaataagtagaaagtggatcaaatagagataaatgcatccaagaaagataaagcaagagagtcagaaagtgtggaggggagaggttgttggtgggggggagttgcaatttttatttatttatttatttatttatttacttattgagatggagtctcgctctgtcacccaggctggagtgcagtggtgcgatctcggctcactgcaacctccacctcctgggctcaagcaattgtcctgtctcagcctcccaagtagctgggattacaggcgctagccaccacgcccagctaattttgtatttttattttttatttttatttttgttgttgttgtttttgagatggagtctcgctctgtcacccaggctggagtgcagtgacgtgatctcggctcagtggaacctccgcctcccgggttcaaccagttgttctgcctcgtactccctagtagctagagtcctagctacaagtgaacgctacaagtcctagctacaagtgaacgcctccacatccagcaaagttttttttctttccttttttttttttggagacagagtgagactctgtctcccgggctagagtgcagtggcgtgatctcagctcatgcaacctctgcctcccaggttcaagcaattctcctgcctcagccttccgagtagctgggactatgggtgcacgcccacacgcccagctaatttttttttttttttttgtattttagtagagatggggtttcactgtgttgcccaggctggtctcgagctcctgagctcaggcaatccgcccgccttggcctcccaaagtgctggaattaatgcgtgagccacagcacccagcccaggcccaggtaatttttcttttttttcttttttttttttttttgagacggagttttgctcttgttgcccaggctggagtgcagtggcgcaatctcggctcaccacaacctccgcctcctgggttcaagtgattctcctgcctcagccttccgagtagctgggattacaggcatgcaccaccatgcccggctaattttgtatttttagtagagatggggtttctccatgttggtcaggctggtatcgacctcctgacctcaggtgatctgcccacctcggcctcccgaagtgctgggattataggcatgagccaccgcacccggctggagctgcaattttaaacagggaacttggacaaggcctccatgagaaggtggtatgtggtatttgagccatgtgggtatcggagtgaatagcattccaggcagacagaacagttaagtgcaaaggccctgaggcaggagtgggcttggagtgtcagagcaacagttctgaggcccgtgtggctggaactcagtgagaaaggggagagagtgggaggtgagggcagagaaggagcaaaggggttcagcatggtggttcatgtgtgtgatcccagcactttgggaggccaaggctgggggatcacttgagcccaggagttcaagaccagcctgggcaacatagtgataccccgcctctacaaaacaaatacaaaaattagcccagcatggtggcgtgctcctgtagtcccagatactagggaggctgaggagggaggatcacttgggcctgggaggtcaaggctgcagtgagccaaaatcatgccgctgcactccagcctaagcaacagagcaagactttgtctcaaaaagagagagggccaggtgcagtggctcacgcctgcaatcccagcactttgggagtccaaagcgggcggattgcctgagaccatgcaaagggggtcagatcatgcaatgcaaagccttttaggccacgatgaagatttaggcttttctccaattgagagtagaactgagggagggcatgagctgacttaggttttgagagaatcctgctggctgcgaggtggggaacagactgtagggagcaagaagcagggagcccagtgaggaagcgactgcgatagtccaggtggaagacaagacaagatggtggtcagatcagggtggagacagtggcagtggtccccaggactgctggctgggagattgtgcttggatgggcatgcatgaaggagaaatggaggaagaagggcagtgacaggttagcacatttagcttagcactaatggcaatgccaggcattgtcctaagtgctttattattgttattattattattattttgagacgcagtctcgctctgtctcccagtctggagtgcagtggcgtgatctcggctcactgcaagctccacctcccgggttcatgccattctcctgcctc[132 bp omitted]c[136 bp omitted]gctgcgcctcccaggttcacgccattctcctgcctc[135 bp omitted]gcctccaaagtgttttttgtttgtttgtttgtttttgagacaaggtcttactctgttgcccaggctggagtgcagtggcacgatctcggctcactgcaacctacgcctcctgggttcaagcaattctcctgcctcagcctcccgagtagtggatattacaggcatccaccactgtgcccggctactttttgtatttttagtagagacggtttcacc[141 bp omitted]gcccaggctggagtgcagtggtactatctcggctcactgcaacctccacctcccagattcaaccaattctcccgcgtcagcctccagagtagctgggatttcaggtgcgtgccaccatgccctgctaatttttgtatttttagtagagacaaggtttcaccatgtgg[136 bp omitted]aaccgcccttttggggtaggtaccgttttttcttcctccgttttacagaggggtaactgagacacagagaggttaagtcacttgcccacagtcacacagccagtaagaggaagtggctggatttggacctaaaatgtctggctgtggagcccaagcgcttaacaacaccaggaacctcagagaagggtgtgattccggggacagagtggggccctagacagactggagcagagaccgcctggtgcgggaggtggggcggtgactcaggcaggcctggagagggctctgctgtctcggattttcgactttagggagggggccgcgggggcctagggacggtgacagggaggagggctccaggtagtctctgttaattagagattgggagaggaccggcctggcaaggcgtcaccaagggagaggagaggggcccgagagctgataggcgtggcccaagagaaggggagagatggaacctaaagtggcttgacatgcgacagggaggggcacaggagcccggaggagcatggggaggggcagagggagactgagcccccggggttgcgggtgatggtcctcaggcagtgcctgattcagccgggagcaggcaggggaaagccacggggctcagcacagggcagggctggagggagaggagcctgaaattgacacgcgcagcctggtaagggggaggggcatggggcgggtcggggcctgagacagcgggggatcgggggtgtggccgtggctgtctgggttcagagtcaatcttgcaacagggcccccttggcaagggtcacagtgcgacgccgcgctccccttcaccaccccagctcggcccagcgagaggtgcagcacgtgcaggccgagggcggggccggcgcggagagggtggccctgcatcgtagtaggtccctcccccgcagtgctcccagcaggcccgctcgttctggagaagggcgtgactcgacctgggggtggaccctaggctgaggggtagggtcctccggtgggcttggtcccgaaattgacccgcgcccctccccagttagcccgcggaccgtggactgtattttcagccccggatccgaagtgtcccagggggcgtggcccgtgcgaggggcggggcctgggggcgggaccagagcctgacgtgtgcccgccccggcttctaggcggatcgtggaccgcatggaccgcgcgggggacggcgacggctgggtgtcgctggccgagcttcgcgcgtggatcgcgcacacgcagcagcggcacatacgggactcggtgagcgcggcctgggacacgtacgacacggaccgcgacgggcgtgtgggttgggaggagctgcgcaacgccacctatggccactacgcgcccggtacgcggcgagcccccgaccctgctccccatacaccgtgaccctgaccttctggaccgcctcattctgagaaccctgaacccatttacccggagtccctggcccctaaccaggctctacccacttttaggagcccataactgtgagatcttcagtttctcacctctggcttctcttttttgtttttcgtctgcttatttttctggtatttagctgcatgctaaaaacgatctttttttcaaacatgaagtcacaattaggtgctaaaagccactgaacgcacccaaacagggacttgaaacctgggccctcaaattaaaagtccaatgctctaccaactaagctacccaggttcccttcagggctttcattctgggactcaccacctctgtgacaatatgactagggtacttgagatccctggccaaggacacctactttccatgccttgtcatcctgacccctaacttctgtgacctctcatcctgagaaccccaaagccagttactcagcccctgactctcagatccctcctttctgtcccaagtcccagcctcagtgccccacaccctgccacacacacagccctcattctctccctcctctcctctctgtccctggccccagcctccccgtccagtctgtcctccacagggctccgggggcggggttcttcatgcccagcactgactctgcccctccctccccctcctgggcccccaggagacggtcccactccccagccgggacgtttcctcctgtggctttgtttttctgcattttctgcaccaaatggattttctgtggttttcctgaactcaccacactcttcaaacctctaccttctgcccatattgttccctccagttacaatgcccgtcccctcctctcagtcaagccatctcagtccctgtaagctaccccatcacagccttagtctggggccaaaaggcccactgtcaactcatagtgggccattcctgtctccacacgcttggatcagttatttcttctctctgagaatcaatttttgcattcagaaagtagaatacatggaaaaacccactgtatgtgcttttttgtgatgattaaatgcaatattgtgcataaagagcttagcatataatctctcacaa[140 bp omitted]caaaaccccgtcttaccacaaaaaaatacttagctgggcgtgatggtgtgcacctgtgatcacagctactctggagggtgaggcaagagaatcacttgaacccaggaggcagaagttgcagtgagccgagatcacatcactgcactctggccttggcgacagagtgagactctgtctcaaaaaaaaaaaaatatatatatatatagatagatagatagatagatagatatagatatacacacacatactaataatatgttatataacatattatatacttaaatatatatacaaattatatataaagtatcaatatatgcttttttttttttgtgagggagttttgctcttgttgcccaggctggagtgcagtggcgtggtctcggctcactgcaacctccgcctcccgggttcaagcgattttcctgcctcagcctcccaagtagctgggattacaggcatgcgccaccacgcctggctaattttgtatttttagtagagatggggtttctccatgttggtcaggctggtctcgaactcccaacctcaggtgatctgcccacctcggcctcccaaagtgctgtgattacaggtttgagccaccgcacccggcctacttttttttttttttttttttttttgagatggaatggagtttcactcttgttggccaggctgcagtgcaatggcaaggtctcggcttactacaacctcatcctcctgggttcaagcaattctcctgcctcagcctcacgagtagctaggactacaggcgcccaccaccatgccaggcaaatttttgtatttttagtagagaaggagtttca[131 bp omitted]acatagcctccctctgtcgcccaggctggaaagcagtggtgcagtctcagctcacggcaacctccgcttcctgggttcaatcgactcttgtgcctcagactcccgagtagctgggattacaggcgtgccccaccatgcccggctaagtatttttttggtagagatggggtttcgccatgttggccaggctggtctcaaactcctgacctcaagtgatctgccagcttcagcctcccaaagtgctgctattacaggcgtgagccactgcatccagcctactgatatatacttattaactccacagaaatctttgtaccccagtaggatttactttgtctttgttttaacctgcttggcgtttcctccattaaagctcatctcactgagacctgtccttccccaggtgaagaatttcatgacgtggaggatgcagagacctacaaaaagatgctggctcgggacgagcggcgtttccgggtggccgaccaggatggggactcgatggccactcgagaggagctgacagccttcctgcaccccgaggagttccctcacatgcgggacatcgtgattgctgtgagtggcggctggggaaccctgtcccccacacccttccggggacccaggcttccggttcaggtcctgcttcccagcaccgacctgggggcaggcagtcacctggttctccagcatcttgccggggaagccaggccgcaaacacaggtcagaggacggtgacctttcccacctccactctcagtcccctggggtctgatctctcctcgtctggccttcccctccctgtgctcgcatttggggtccaggcccccagccttccctcagacagccactgtgccccaccttatacaatttcttttctttcttttttttttttgagacatagtctccctcggttgcccaggctggaaagcagtggtgcgatctcagctcactgcaacctccgcctcccgggttcaagcaattctcctgcctcagcgtcccgagtagctgggattacaggggcgcaccaccacacctggctaatttttagtagagacagggtttcttcatgttggttaggctggtctcaaacttttgacctcaggtgatccgcccgcctcagcctcccaaagtgctaggattataggcatgagccaccgtgcccggccaatttttaatttttttttctagtagagatgggatttcaccatgttggccaggctggtcttgaactccggacctcaggtgatctgcccaccttggcctcccaaagtgctgggattacaggcatgagccaccgtgcctggccccaaaatgtgctttgttctatagaagaaggctttttttttctttccttcctcttttttttttttagtttttgagacagggcctaactctgttacccagaccggagggcagtggctcaatctcagctcactgcaacctcaaactcttgggctcaagtaatcctcccacctccgccttctgagaagctgaggccaccaggcacaagccaccatgtctggctaatgtttttttttttttttttttc[132 bp omitted]cgccatgc[142 bp omitted]gccatgcctggctaatttttaaattttgtgtagagacagggt[135 bp omitted]taaattggggaacaaaagtcgttttgctccagaagggcacaaaaacaaggagcggaggtgtccagtgtgtcagaagaagccccaaagtgcaccatgttcacacataaagcagaggtaggttctaggctctgctaaacataaaggagcttctccccttggagggtgtttgctggggcttgagcaagttattagggacccaggacagctccccttgtgagcaacaaacctgtgcactgctggacattagggcctctgggctctggccccgtaaatgcaggtggtgcctgtttgatgataacatcccagaaagcccgcaaatttcccacatgccacctgttgagactgctctactgcctgcctcccacagctgcccggagctaaatttccaagagaacctctcactcttaccccaggggtccagcctcccccaggagccagggtcatcggcccccagcctcaatgcccctttctcctccaggaaaccctggaggacctggacagaaacaaagatggctatgtccaggtggaggagtacatcggtgagtgggccccaatttcttcttgggatgcctgtcctctctcaggcatgggcagggttggtgggggtagccggaggtacatcacccatcatcagagaacagtggccctcagacatgggggcaggggcactcactgcttgagttcatttagccacccaacatttattgagcacctactctataccagacacaaaaagcatctattgagcacctgctgtgtgtcacgcccaggatacacttactgagcacctactgcatatgggtggttgcgcctacagcagacaataacacagacaaatcccttcttgggggtctggagtttctacaaaatcaaggctcaggggctatgtttagttgagaatgggggtcaggaagctggtcttgaacctgcgcctgcacagcaaacactgtttcctgttacatgggatgttgggggatcctcacaataccccctgagttctgagttctccctgggcccctgccactgtc[131 bp omitted]gcaacctccgcctcccgggctcaagagattcttctgcctcagcctcctgagtagctgggattactggtgcctgccaccacgcctggctaatttttgtatttttagtggagatgggatttcaccatgttggccaggctggtctagaactcccaacctcaggtgatctgctcatcttggcctcccaaagtggtgggattacaggcgtgagcaaccacgcccggccaggaatttttttttaagtttgaaaacattgtttattcttttatttttttctgaccacatcctacatgagaaaacatttttctttctttccttctctcactttctttctttctgtcactctttctttctatctgtctgtctgtgtgtgtgtgtgtctctctctttattaaatagagatgggttctcactatattgtccaggctggtctagaactcctgggctcaagcaatcttcccaccttggcctcccaaagagctgagattacaggcatgaatcaccacacctggctgagagaacatttttatatttttttcttaagagatggggttgggccaggcgcagtggctcatacctgtaatcccagcactttgggaggctgagatggatggatcatgaagtcaggagttcgagaccagcctggccaagatggtgtactaaaaatacaaaaattagccgggcctgttggcaggagcctgtaatcccagttactctggggactgaggcaagagaatctctggaacccgggaggcaaaggttgcagtgagctgtaatcgcgccattgcacttcagtctgggcaacaagagcgaaactccatcttaaaaaaaaaaaaaaaagatggggtcttgccctgtcgcccaggctggagtgcagtggggtgatcttggctcactgcagccttgacctcctgggctcaagggatcctcccacctcagcctcccaagtagctgagactccaggcacagtgcggcctctggagatacttctggttgtcacttctagaggggtgaggatgctactgacgtctcctggatagagcccagagatgctccttagcattctccggtgcacaggacaggccc[131 bp omitted]tccgcctcccaggttcaagcaattctcttgtttc[213 bp omitted]ttcatcttccattcctcagctctaccaggcagacactgtcactatcctccattatatagatgacacctgaggcccaggggggttgaagggatctgctgaagacaatgggaagaggcagggctaggatttgaaccttggtgtttgggctctggcacctatttcttaactcctccccaaccagtaacatatcaaaatgtataaaattggggtgggtgccatggctcacgcctgtattcccagcactttaggaggccaaggtgggtggatcacttgaggtcaagagttcaagaccagcctggccaacatgatgaaaccctgtctctactaaaactagaaaaattagctgggcgtggtggcgggtacctgtaatcccagctacttgggaggctgaggcaggagaatcacttgaacccagaaggtgcaggttgcagtgagctgagattgtgtcactgcactccagcctgtaatcccagcactttgggagactgaggcaggtggatcatggggtcaggagtttgagagcagcctggccaagatggtgaaaccccgcctctactaaaaatataaaaattagctgggtgtggtggcacgcacctgtaatcccagctacttgggaggctgaggcaggagaatcgcttgaacctgggaggcagaggttgcagtgagctgagattgcgccattgcactacagcctgggcaacaagagcgaaactccatcttaaaaaaaaaaagggggtggggtcttgccctgttgcccaggctggagtgcagtggggtaatcacagcgagactccatctcaaaaaaaaaaaaaaaaatttgtagaaacagggtcttgctatgttgcccaggttggtcttgaatcttggcctcaaatgaccctcctgcctgggtctcccaaagtgttggattacagtcatcactgcacctggcatctctgtcacctgctaactggccagaaacatcctcgcacgttcctcctgcatagacattgcttactatgtgccaggcactgccttgcccattgcacacactacttcacgtgtgtgtcaatgaaatcaatcaatcatgcaatcaaccaatcaaatgaatttcacctgtaacacaaatgattgcttataagtcaggttttgttactaattccatcgaaacagaagaggacgctgaggcgagagagagggtagtgagttgctcaagggcctggttcaggaagtatcagagccaggatcagcccccagctccactagacccccagagctgcccctgaccttgtcccctctgtcccggcccccagcggatctgtactcagccgagcctggggaggaggagccggcgtgggtgcagacggagaggcagcagttccgggacttccgggatctgaacaaggatgggcacctggatgggagtgaggtgggccactgggtgctgccccctgcccaggaccagcccctggtggaagccaaccacctgctgcacgagagcgacacggacaaggtgcagtgacggggcctcggcaggagcgaggagcgggtgggcattgcgggccagactccagaaaggagcaagacctgggcctggagctcagggtcccttttaggtgggataaaaaaagagggacagagagagggaggaaaagagagggcacggagccccagaaagagagggggacagagacccagagacccaaagagagaaggacagggaccaagacggggacagattcagagagaaagggacagaggcccagagaacaagggtcccagagacttcgggacacgcttggatgcagggagggcttttgaaagcagggccgtgttgtcccctctgaaccctgaccctccctccaggatgggcggctgagcaaagcggaaatcctgggtaattggaacatgtttgtgggcagtcaggccaccaactatggcgaggacctgacccggcaccacgatgagctgtgagcaccgcgcacctgccacagcctcagaggcccgcacaatgaccggaggaggggccgctgtggtctggccccctccctgtccaggccccgcaggaggcagatgcagtcccaggcatcctcctgcccctgggctctcagggaccccctgggtcggcttctgtccctgtcacacccccaaccccagggaggggctgtcatagtcccagaggataagcaatacctatttctgactgagtctcccagcccagacccagggacccttggccccaagctcagctctaagaaccgccccaacccctccagctccaaatctgagcctccaccacatagactgaaactcccctggccccagccctctcctgcctggcctggcctgggacacctcctctctgccaggaggcaataaaagccagcgccgggaccttgtgtgtctgtctgttgtctgcctgtctctatgaagggtaagggggccctggagatggtttgggggctgtgactgggagttgggggctgagacatgcaataggggaccaggcatttgaaggaggggtgctgggtgttggagggattggagggcgttcctcagtataaaacaaacaaacaaaaaaaattgggccaggcccggtggctcacgcctgtaagcccagcaatttgggaggctgaggcgggtagatcacgaggtcgggggtcctagaccagcctggccaacatggtgaaaccccgtctctactagaaatacaaaaattaaccaggcctggtgatgggcacctataatcccagctactctggaggctgaagcagaatcgcttgaacccgggaggtggaggttgtcgtgagccgaaatggcgccactgcactccagcctgggtgacagagggagactctgtctcaaaaaaaaaagggaaaaaaagcctggactctgcagcgcacaaaccagacaggaagccctgccctctcagagctccagttctgtaaggaagagacacagcgacctaaaatatggcacggcgcaacagatgctgtgaagcaggggaagcgtgtagcagtgtggcaatgttctgatgactgagaggctgggaaaggtctcaatggtaaatggagtgaaggagggagccacggagagatctggagggagagcattccagggagagagaagagcaagtaaaatggccctgaggcaggagtgggcctggtgtggcagcatcagcaaggaggctagagtggctggaagggaatgagccagtggaagagggtcagagctgagagcagatggggcaagtggccagactgtgcaggcccctgcaggcaggtcatggtggtccctgtttggtggcacaagacagggatggacagagacccagagagaaggggtggggagtcagagagagagggacagagacccagagagagaggggaacagagacccagagagagagggacagagacccagagagagaggggaacagagacccagagagagaggggaacagagacccagagagagagaggggaacagagacccagagagagggagacagaaactcagagagagggaaacagagacccagagagtgggggacagagatccaaagagaatggggatagagacccagagagacacagaatttattctgagtgacatgagagtcgctggagtgtcatgagcagaggagggattataaactgctttgagttatttaagagtcgggttgggcgcagtggttcacgcctgtaatcccaaggattaatcaaggattgcttgaggccaggagttcaagaccagtctgggatgatct[139 bp omitted]gaccatatctctatttaaaaattagtttatggccgggcacggtggttcacgcctgtaatcccagctctttcagaggccgaggcaggcagatcacgaggtcagtagatcgagaccatcctggctaacacggtgaaaccccgcctctactaaaaaatacaaaaaattagccaggcatggtggcgggcgcctgtagtcccagctactcgggaggctgaggcaggagaatggcctgaacccggga[132 bp omitted]caagaacaggcaaaactaatctgggggttagaactcaggatgttgttcacccttgcgggggagggaccagaatggacctcatgggcttcttatcgggagagggaggctggaaaatagcctattcttgatctaggtactgcttcccaggggtggtcagattatgaaaattcattcagttctcca[131 bp omitted]gcaacctccacctcccaggttcaagcgattctcctgcctcagcctcctgagtagctgggattacaggcatgcaccaccacgcctggctaattttgtatttttagtagagacagggtttctccatgttggtcaggctggtatcgaactcctgacctcaggtgatccacctgcctcagcctcccaaagtgctgggattacaggcttgagccattgtgcctggccgatagctattttttttttttttttttttttttttttttgagatggagtcttgctcttgtcatcctggctggagtgcaatggcatgatcttgactcactgcaacctccacctcccgggctgaagtgattctcctgtctcagcctcccgagtagctgggattactggcatggaccaccacgcccggctaatttttgtatttttattagagacggggtttcaccatgttggccaggctggtctcgaactcccgacctcaggtgatccgccctccccgacctcccaaatttctgggatcacaggcatgagccaccgtgcctggccagttcggtttttttttttaggtttacctgggctttttggagtgtacccatgcagccaggtgtggttcagggtcagctagatatttgagtagagttgggccgtgtgcggtgactcacgcctgtaatcccaacactttgggaggccgaggcaggcggatcatgaggtcaggagatcgagagcatcctggctaacacggtgaaaccccgtctctactaaaaatatttaaaaaattagcctgggcgtggtgttgggggcctgtagtcccagctactcgggaggctgaggcaggagaatggcgtgaacccggtaggcggagtttgcaccactgccctccaacctgggcgacagagggagactccgtctcaaaaaaaaaaaaaaaaaaaaaaaaaaaaaagatacttgagtagagtttatagaaaccattccaggtaccctctctccagcttttcttttccaggatttatctcctcaccttccttttgctgtagttcttcaagctaggaagactggatttccctctggtgttttagctgccagtcatggtatgaactagaactcacccccaagtaaaagctgtacaaataagaaactcgcctttcttttttctgagtgtcaagttccctccagttgctctgtctgcttttgtttaccttccagtgccttgcctttgggtaattgttttccacgttttttccagggtttatagctgttgtctgtgtgggagggctggaatttgaatccaagcgcgtctgactccaagcgttttcgtatgataacatactgccctctagtggctggatgtggagaactggtttatgtgggaggaagggcatattggtaaatctctgagggctgcatgtttggaaacattgtttatcgaaaacaatacccacacatagcaacaaattacttgcacagaacagtttatggtgaaaaactgcctagcatcttgtcacacttactgcttctctccagaatttttttagttttaaaatattcttgcatattttattttaaaataatggccatactctcacaggatacaaaacccgaaatatacaggatgctacaagctaaaaacaacgccttccactaagttcaactcttcacagacagccagtgtttcctaccatggagaatctacacagatttaagcaaatatgtacaaatagtctttatttttttttggaagacgaatctcgatttgtctcccaggctggagtgcagtggtgcaatcttgtctcactgcaacctccgcctcccaggttcaagcgatactcctgcctcagcctcccgagtaactgggataacgggcacgggccaccat[142 bp omitted]caacctcccaagtagctgggactacaagcgcccgccac[138 bp omitted]gcccagccattttttgtattcttaatagagacggagtttcgccatgttggccaggctggtctcgaactcctgatctcaggtgatccggctgcctcggcctcccaagtgctgagattacaggcgtgaaccaccatgtcttgctaatttttgtatttttagcagagagggggtttcaccatgttggtcaggctggtcttgaactcctgacctcgagatctgccctcctcagccccccaaagtgctgggattacaggtgtcacccaccgcttccggccgcgttttttggtttgtttgttttgtgtgtgtgttttttgttttgttttgttttgttttttgagatggagtcttgctgtgtcgcccaggctggagagcagcggctcaatctcagctcactgcaacttccgcctcctgggttcaagagattctcctgcctcagtcttcctagtagttgagattactggtgccggccaccgtggctggctactttttgcgtttttagtagagacagggtttcaccatgttcgccaggctggtctcgaactcctgacctcaggtgatccacccacctcagcctcccaaagtgctgggattacaagtatgagccaccacgcctggccctggcctgcgttttttaagacataatcttgctctgccacctaggccagagtactgtggcactccagttgcagagagccaacattgtgccattgcactccactgatctcagctcactgatctcagccagctgcaagcgattctcgtgcttcagcctccctagtagctgggattacaggcgtgtaacaccacgcccagctaatttttgtatttttaatagagatggagtttcaccatgttgtccaggctggtctcaaactcctaagctcaagcaatcttcctaccccagtcccacaaagtgctgaaatcatgggcaggagccactgcgcccagccattctagctcgtgttttgctgagcatcgtcgcatgtctttggggtacacacacaggagtgaggtagtggagcaccggctaggcgcatttttagcgttaatcgatattgccaattcatttccccagtttacgtgcccaccagcgttgtagacaagttccagtttctccacatcctgaccaacgcttattagaataaacttttgaactgtttttgcttttagttcttccgttggtgacctccccacttgcagatcagcagatcaaatccccatgctgttgacaacacgctgggagcaaagagccaggtggagcttctaacgaagtcagatcttctgatattttaaaagctgagataaaattcacaggccataaaattaacccttggtcgggcgtggtggctacgcctgtaatcctagcacttcaggaggccaaggtgggcagatcacttgaggccaggagttcaagaccagcctggacaacatgacgaaactctatctctattaaaaatacaaaaattagccgggcgtggtggcacatgcctgtaatcccagctactcaggaggctgggacaagagaatcgattgaacccgggaggcggaggttgcagt[131 bp omitted]cccggacagccactaactactttcttttgctatggatttgcctattctgggcatctcattataaatgcaatcgtacgtgtgacctttcgtgctgggcttctttcagcatgttttccagatccatccacactgtagcccgtgtcaggacgtcattgcttttttttttttttttttttttgagatggagtctcactctgttgcccaggctggagtgcagtggcgcgatctcggctcactgcaagctccacttcccgggttcatgccattctcctgcctcagcctgccgagtagctgggactacaggtgcccaccatcacacccggctaattttttgtatttttagtagagatggggtttcaccgtgttagccaagatggtctcgatctcctgacctcatgatctgcccgtctcggcctcccgaagtgctgggattacaggcatgagccactgcgcccggcccaacgtcattcctttttagggctgagtaatattccatggcacgggctagaccacattttgtctccactcatcagctgacgggcttttgggttgtttccacttctgggctatggtgaatggtgctgttagggtcattcatgtgcatttgttttgcctcagcctcccaagtagctgggattaaaggtgtctgccaccacgcctggctaatttttgtatttttggtagagatagggtttcaccatgctggccaggctggtctcgaactcatgacctcgtgatccgcccacctcggcctcccagatcacgtacatatttttgtgtggacctgttttcagtttcttgggtagataactaggaggggaattgtgaagctgatttttccttttatacatgtctcactctgtcacccaggctggaatacagaggtgggatcacagctggacctcctgggctcacaccatcttctggcttcggtctcccatgcagctgggactacaggtgggcaccaccatgcccagctaatgtattcttttttgtagagatggggtcttgctacaatggccaggctggtcgccaactcctgggttcaagcaatcctcctgactcggcctcccaaagtgttgggattacaggcgtgaaccaccttgcttgggctgattttttttttttagatggagtctcgctctgtctccaggctgcaatgcagtggcacgatctcagctcactgcaacctccacctcccaggttcaagcgattctcctgcct[295 bp omitted]gagatcccttccctacttaaaaaatacaaaaattatccaggcacagtggctcacgcctgtaatctcagcactttgggaggccga[134 bp omitted]tgaggcaggagaattgcttgaacccaggaggcagaggttgcagtgagccgaaatcaggccactgcactccagcctgggcgacagggcgagactccgtctcaaaaacaaaaaaagagaaatggaaatctagtttttcacatgaaatctcccagctccttttttgcatttgaaaacttcatacagtaaaatccactccttttggtgaacagttctgaattctgataaaccagagtcatgtaaccaccacagtcaaaatccggaactgttccttcacacccccccagaatctctcttgctactccccactttggggtcaactccttcccctactctggcaacgaaagctttgttcctggttcgtatagttttgcctttgcagtgtcagaataaatcttcctgtttttattttctattgttttgatatggggtctcgctctgtagctcagactggagtgcagtggtgctatcgcagctcactgcagcctccacctcctgggttcaagcgattctcctgcctcagcctcctgagtagctgggattacaggggtgctccaccacacccagctaatttttgtatttttagtagagacagggattcaccatgtggaccaggctggtctccaactcctgacctgaggcaatccacctgctttggcctcccaaagtgctgggattacaggtgtgagctaccaggcccagccatcttcctgtttttaattttttttttgagatggagttttgctcatgctgcccaggctggagtgcagtggtgcgatctcggctcactgcaacctccatctcccgggttcaagcaattctcctgcttcagcctcccaagtagctgggattacaggcctgtgccaccacacccgattaagtttgtatttttttttagtagagatgaggtttcaccgtgttggccaggctggtcccaaatacctgacctcaagtgatccacccaccttggcctcccaaaatgctgggattacaagtgtgagccactgcgcctggcccgttttta[136 bp omitted]ctcctgagtagctgggactacggacgcatgccacgacgcccggctaattttttatattttcagtaaagacagggttttaccctgttagccaggatggtctcaatctcctgacctcatgatctgcccgcctcagcctcccaaagtgttgggattataggtgtgagccaccacgcctggcccgtttttaaatctttacaagtaactgtaattttctggacgcgctgcctgtgagcttcttgaaactggagccctcggcaggcacgcctgccatcagcgccaccaagcccaggtcttgctctaaactttagaccagtgtctaaggaaactctgctcaaaaaagacaagatttgtctcacttcccgtctctttcttctgctacggctgaagctgtggttctgctcttgcttcctctccaagtactttagaaccttaaatgacagaacagggtgaggtgactcaaatgtgtaatcccagcactttgggaatctga[151 bp omitted]cctgtctccactaaaaatacaaaaaagaattagccaggcatggtggtggtcgcctgtagtcccaactactcgggaggctgaggcaggagaatggcgtaaacccgggaggcagagcttgcagtgagccgagatagcgccactgcactccagcctgggcaaaagagcgagactccgtctcaaaaaaaaaaaaaaaaaaaaaaaaaaacccagcctggccaacatggcgaaactacatctctactaaaatactaaaaatacaaaacaaacaaacaaaaaccagctggctgtgctggcagcacctgtagtcccagctacccaggaggctgaggcaggagccaggatcacgcaagtgcactccagcctgggcaatagagcaaggctccatctcaaaacaaaaaaaaaaatgacagaacagattggagccaggactttgacctccccaccctgcactgcacaaagagtctgtgaacagagtggtgtttgagttcctttgggaaaacacaggtgcaagattagaaacccttcaggttattactgggggcaccggtgatctgttcaacatatgaacaagactggggttcttagatggctgagaaagctggaaggactcgggtggttgagaggtcttgagaaagaggacaaggattagggatgtggaaggaaagggtatgacatggaactctgggtatggagggatggggtgggagcttgtggaggtggagaggccagtgggtctctaggggagggaggacatgaaggatgggggaagtccaggacaaagtctgggggcgtctcagaggaaactggctcctgggggaacctggcttccgtcactccctcgagcacgtgtgactttgctcaagttgtgccttctcgatcatgccattgcactccagcctggggagtggaaaagtattactcactgaacaggatggtgcatgcactgtgattcactttggttgaaacctcatgtgtactcacataaagaacaggaaggacagaacctaggtggcattgctctgcgaggcaggaatgctgtgttttttgttgttggtgttgttattgttgttttttgagacagagtctcactttgtcgcccaggctggagtgcagtggcacgatctcagctcactgcaacctccgcctcccgggttcaagcaattctcccgcctcagcctcccgagtagctaggattacaggcgccggccaccacacccggctcatttttgt[265 bp omitted]gcccagcagctgcttttgtgactcaatggttattaaacacaaggccttaaggacagcccctacattcccagtcaagtctgacgccaccgggctggttcctggtccccgctctgccctggctccctcactctcccctgtacgccctctgctccttaaatctgcaaagtgcgttgctgcctctgggcctttgcactcgcggtttcctcttcctttccccctcaggctgccacaggtgggggcgtgatgctcctgaccgcctttcctagtccgggtgctgcgcactttttcacagaactgcacttcctttgtgggtctaatcacactgcagcccggaagacacgttcctgggcatttcctgttcttcaaacctggcaaaaatccgggaaccctaacaaagaactcgagaaatttctatgtagctcattaaagtggcgcactcacacggtcttggcttagacttggacttccggccactcaaccaattttaatgctgtgcatttgcgttctattcaggtttttttttttttttcttctttgagatggagtctcgctctgttgcccaggctgaagtgcaatggtgcgatcttggctcactgcaacctccgcctcctgggttcaagcgattctcctgcctcagcctctggagtagctgggaatacaagtgcgcaccaccatgcccggctaatttttgtatttttagtagagacaaggtttcaccatgttggcca[131 bp omitted]cccgctctttcaaactccagcgtgcgctgtaggagcactgtttgcacggccctgcatcctcgcctgccctgtccccggggcgcccacgccgcgaatgaaggcgccacgtcgttgcgcacccaagccggtttatttggtctcccgcacacactcaggcctgcatcaccggccgtgatttctccgcttgcagcttcactccggagcccgcgaagccggtaccgccctgggggaggtagagagaaggacgaggtagaggccggcccgggggtgaccagtggggctccaggtggtagtggggattcctaagcgggtcaaggtgaagcgggttgctggctaaggagtaggagttggggagggggcgaggcgaccgcagtgggtacggatggacagggcgcagggcgcagagaagagggtagagagtggcaggggaggagccttgggagggagcgtgtggagggggtggagccgtggagggctggaggcagggaaggggcggggccttgaaaaggaaggaggaggcggggcctaggagagcggagggggggaagggcggggccttgcaggagaaagcggggggggggggcggccttacagagcagagaagaaggcggggccttggagagttgggggaaggggaggggacgaagccttggagggggtgaaggggaggggcggggccttggagtgctgggggaaggggaggggtgggactcttacccgctgcagcacgatgatgtcgcggtctgtgagtttgtctccagtcacagggtccaccatgtccttccgaatcagcttctccacgcattcgagggtgaccacagccccactacggtgaggccgaaggcgggagactctgatcaggggccttcctggggacctactggccccaaagccggaccgccccgcaggttcccgagtggtcccttccctcccctcccaggtgactcacgagggccgcagcacagcgcagggggtggcgttgctcaggctgtcgcgggtcacggcacacacgtagcgctcgctgcgggtgatgagccccacgcggtccacggagctgtctagcggtgtgaagtgcacgggcgtcaggtccgacatgcgcaggggcttccctgacatggggcaggtcaccgtgcgggactgcaaggggcagagagaggcgggctcagtaggcagggctggcgcaggtggagagcgcgtggtccctgtgcgtgaggaggacggtggggaaccctggcgccctggcaccgtgcgtgccggggcgctgtgggggctcaccggcttctccagcttggtggccttggcttcgggcgtcagcgacgggatccagaagctgggcagcactttgtccttgtccttacttggaggacccacactgggcccaggttggacatcatctgtgggggaaggaagggactcagatgccgccccctgggcccgcccagcccgcggcgccccgccccccaacccacaagaagcccaacctgagtcacctgggctggtgcccgagagggccttggctgtgaaagggttgaggggccggctcacgatagccgactccttctccaggaagccccgcacatggtcctgcgaggccgcccgctgaagctccttctgctcctcgcgccgggtgccccgctgcttctcgtaggcctgcgtcggggaaagtgggctgagcatctgcccgtggggctgggggtatcttcctcccatttcacaggtaggtaaactgaggcccacaaaggggaccctctgatggaggcactatgtggcagagggtggtaactgccaccctgggtgggtgtgaaccttactgcgttgtatagccagactgccagggctcaaagcccatctctgtcactctgtggcctaagtgagcactatgacctctcctggcctcagtttcttcatctgtaaaacagcctaacagtggttacccacctcagcggctcactgaagggttacataaggtgagtgtttacagcatggagagcctcacctggcactcagctaagcatttaattaatgtcacctgctggccaattaagttttctatacagtgcatgccccagcccgtgtttgggacgggggatgtagacttcagatctaagggaatgctgaggagcccatgtctatggacggacagtgagtgaggacgggagaagtgaagccatgacctgagctcagccctgcctggcgcacagcagttgcctgggcggtgctgcagttccagaccaccctgggccacccagctgagtgaggaggtaacagtgacagtgatggatgctcatgagggcctccgacatgaccaccaggctgtgtggaggacatgggcacagggggagccacctgcttgggacaaaaagcccaataagcatgtgacctgtagtgtttcctgagcgccagcaaccaggcaggggaagagggggacagacccactgtgcctcaaacagggcccctcctacccatcaaatggctttgtccatggaaggccaggccgggttcccagtaacacgccttgagaatgctcatctgcgtgtacctcccaggtgccctgctgtgtcctctgatttggccgtcagcccgttttacagacgatgaaactgaggcccagaaaaaatgaggtgatgtcaattcacgtagcacatctttttttttttttttttttttgaaacagaatctcgctcggttacccaggctgaagtgcagcggtgccatctcagctcactgcgacctctacctcatgggttcaagcgattctcctgcctcagcttcctgagtagctgggattacaggcgcccgccatgcccggctcaatttttttttttatttttttatttttagtacagacagggtttcaccatgttggccaggctggcctctaactgttgacctcaagtgatccgcctgcctcggcctcccaaagtcctgggattacaggtgtgagccaccacccccgacccatttagcatatctttactaaggacctaagctacagggtgggaaaactcgaagtccataagggaaagtgggcatgtgtcagacagccacatgtacagctacaactatgctaagtgctaagagaagaggtgactggggcagatcctggggactggcaggagctcagaggaggcagcatctgggctgaaatcggtgagaaggatttggccggaagcaggggaggggaatggtgtaccaggcagagggaactgagatcagagggctctgagtggctctgcctgtgagctcagactcaaaagctcctgcctccgtgtgccgcctcctccccatccccatcaccttcatctgccgggcaatctccttcttctggtgcagaatgtactccaggatggcctcacgctcatacaggtagccatctgggctgcaaagacagggtgcaatgagaaagaaagaaagtgatcctcccgcctcggcctcccgaagtgctgggattataggcagaagtcatcatgatcagtcccaagttcaattatttgctagaattcacagaactcagcaaagctgttatactcatggtgatagtttactgcagtgaaaggatgcagattaaaatcagcaaaggaaaaaggcacatggggcagaatctagtagagactagatttgagcttccagctgtcctctcccaatagagctgcagggaaagtgcttcattctctcagcaacaatgtgtgccacatattgttgcagccacgagttcgagaccagcctgggcaacaaagtgagctcccctctctacaaaaaacaaacaaaaacgccaggtgtggtagtgcacacccgtggttccagctactcgtgggggctgaggcaggaggatcacctgagcctgggatatcagtgagccaagatgtccccattgcactccagcctgggcaacaaagtgaagactctgtctcaaaaaaaaaaaagaaacctgaaggtggccttgggggccctgatcattaattactgtcttctacaaaatataccactaattgagcacgtatttagtgcctggactcagcacctgttaagcctttgccctaccatcagaggtaggtcatgggaagtgtccaaaggtgagctgctccgatggcctcggcaatgctctgagagccctacaccccattagaagtatgttcctttccatatgttccacactatgaaacagatgctaggatcatgcccatgtcccatgtgagaatacagaggctctgaggataaactgctcatccagggttccctggctgtgcaggtggccagacccacgcacacagcctcctcctggcggttcccttgctctccccacccagacctacccatccctgttcccagctcacgtgacaacaggatcgtggcaaggctgcagggagagacaacagcagtcgaagtccttcacggcatcccggctcagtcgaatgttctgggtcccatagcccgaggccgctggggacagagatgggcagagtgatggaggggcggagcaacaggagacatgtccgtctccaaagccccagagagaggcacagagacaacgcggtggtgggggtgggggactcagagagaaacaggcagttgggagccgctgcctgtgtgctggggccacgggctgaacccacagggagttgtcaaccctggagggtgagaggcagacaggcctggtcactgagtggcagcttggtggaggggctgacggctgactcccctccacccttctgactgtgaccaagctcaagtgcctgtccctctttgggcctcagtttcttcctctggaacatggggtaacaagagcaccctccctgacactctgttgggaggagtgagttcatgcgcagaaggcagagaacacagtgccgggccacatggggtcatgggatcacccagctgttgtttacatggtcatggccatcagtgtatatcgggggcgggagagagacagggacagaggaagcaaaacctggggcacgaggggagagggtgactccaagacacagccatgtcccgcctcttcccaccccagccctgcacctgtgtccttcttcttctcgtggtaggtgtagacggcccctgcggtgcagttcttgccatgccgcgtcatcctagggaggaagggacagtggcaggactgtggttaccggaggcaggcagcacagggaagacctctgcagccctcagagctgatctgccccccttgatgggaaagcggaggcggagaaggggggtgaggtggaagagagggagggcatgtggtcgccaggcctcctccaggaagtcctccttccagactcacctagactcatttatatgtgaaaatagcacctttaacaacaaaactctttgtttggaggtaagagggtgagagaccagagttcaaattctagccactacttcagattagctagggtggtggctgtgccatttaatggaggggaaaaaaaaagacaccaagggggccactattgttgatgaatccactccaccttcccttcccctctcatatctgtaagctctgactgaggccaaggcgtggaccagcccagtgattggctcaaggctgggcacttagctaaggcttgacacttagctaaggcttgacccaatcgctgcctgccagtccactagcgactggatctagcagctgtgattatgtctcagatcgaccgatcagagggcaggtcagagtagggctctgtgtctaggggaagagctacctccactcccactgcaggtaaaggaggaagagaagaccccagaaccctggagctcaattcaaaaagcaaagctttttttattctgtaagttttcaaacacatacaaaaccagaatagtataaggaacccccatgatgtacccatgtcctgcggtccagcagctgtcaacattttgccaccttactttgatacctttgatcattccccatacttaagggcaacccccacccttttaaatgactttattgagacacaattcacataccataaaattaacccttttaaagtggtttcagaccaggtgtagtggctcacgcctgtaatctcagcactttgggaggctg[134 bp omitted]gaggcactgagaatcacttgagcccaggaggcaggggttgcagtgagccgacatcatgccactgcactccaacctagacagagcaaggctctgtcacaattaaaaaaaaaaaaaaaaagacattgcctaagccaagataatgcacatttattcctatgttttcttctaggggtttgatcattttaacttttactttttgagttaatttttgtgtatggtgtgaggaagggagccccctacttttctggagttcatttgtaaaaggagaagccctgaacccacagaggctgggcagctttcaccaagactgcttggccagtaaacagcctgcatgcctgtttgtttgtttgttttttgagacggagtttcactcttgttgcccagactggaatgcaatagcatgatcttggctcactgaaacctctgcctcccaagttaaagcgattctcctgcctc[220 bp omitted]gccaggctcagggctcacgcctgtaatcccaaaactttgggaggctgaagcaagaggactgttgagcccaggagatggagatgagcctaggcaacacagcaagatccatctctattaaatttaaaaacaaagaagttgatggccaggtgcagtggctgatgcctgtaatcccagcactttgggaagccgaggcgggggcggatcacgagatcaagagatcgagaccatcctggccaacatggtgaaaccctgtctctactaaaaatacaaaaattagctgggtgtgatggcacatgcctgtagtcccagctactcgggaggctgaaacaggagactcattgaacctgggaggtgcaggttgcagggagtggagattgcaccactacactccagcctggtgacagacagagactctgtcaaaagaaaaagaagagaagagagaagatctagtaacattatatacttgtctcactcatctctaagttgccacctaaaaattctcccaagcttaaacagttgcaaaggatacaatttccagcaacgtaaatgtgtagctgatggaatctaaatactgtaataatttgagaccatttgaaaaatgcaagaaaaagctgtttcaacagcagaaaattatacatgtcctgtttttctctttgaacttgtatttccgttccacttccctctctgccacccatttttaatctaacatcgttttttctttttgtttttttttttgagacagggactcactctgttgtccaggctggagtgcagtggtacaatcacagctcactgcagccttgacctcctgggctcaagtgattctcctgcctcagcctctcgagtagctgggactacaggcatgtgccaccacgcccagctaatttttatatttttagtagagatggggttttgccatgttgcccaggttggccttgaactcctggactcaagtgaactcctggcctcccaaagtgttgggattacaggtgtgagccactgcacctggcacatcatatcttttgtgcttgaaaattcttttttttttttttgagatcgagttttgctcttgttgcccaagctggagtgcaatggcacgatctcagctcactacaacctccgcctcttgggttcaagcaattctcctgcctcagcctcctaagtagctgggattacaggtgcatgccaccatacccagctaattttttgtatttttagtaga[143 bp omitted]ttatatgtctctgcaagaaataaaaaatatggataggaaatccttttaaacatttcccattgttcctaggctataagagtccaatactcttctagatcagtggttctcaaagtgtgggtcctaggaccctgtggtcccccaacacatttctagacagtctgcaaggtcaaaactgttgtcttaataatactaagacattatttgcctttctgattctcattctctcacaagtacaccagaggctccatgaggtgtgacactgcaacactaaattagtagtaatttgttacaacaatgataggaaactaatatagtcaccagggaaacgcacattaaaacttcactgaaggccgagcaccgtggcttacacctgtaatcccagcactttggaggctgaagcgggcagatcacttgaggtcaggagttcaagtccagcctggccaacatggcaaaaccccatctgtactaaaaatacaaaaagttagctggtcgtggtggtgtgcgcctgtaatcccagctactggggaggctgaggcatgagaatcgcttgaacctgggaggcggaggttgcagtgagccaagatcacgccacggcactctagcctaggggacagagcgagactccatctcaaaaaaaaaaaaaaaaaaaaaaacaaaataaaacttcattgagatacctccccacacgcaccacaagggttgcaattagacagaggggtgcaggcgaggacatggagctactagaaccctcgtgcactgctcaggggagtgcagaccagcacaaccactttggaaagcaactgtcagtatctactgaagccaggcatatgccagtcctatgagccagcaattcgtctcccacgtatacacctaacagaagggtacacctgtttacaagacacatacactgccctattcacaatggctcataaactggaaactaccccatgcctgtcagcacagagtagataaagaaactgggccatatcacataatggaaacacccagcaatgagacacaacagcctactgtcatacccatagtatagctgaatctcacagacaccacgcaggcgagacaccagacacgcaaaagaaaacttactgtatgatcccattcatgtgacgttcaaaaactcacaaagtaattactacaccagaagttatgtgtgggtgggtgtggtggctcacacctgtaatatgaacacttggggaggccaaggcaggaggattgtttgagcccaggagtttgagaccagcctgagcaacatagcaaaaccttgtcactacaaaacatagaaaaattagctgggcatggtggtgcatgcctgtagtcgcagctacttgggagtctgagatggatcacctgagcccagggaggtcaaggctgcagtgagccatgattgggccactgcactccagcctgggagtcagagtgagaccctgtctcaaaaaaaaaaaagtcaggtgcctttgggaggcagaaggtgggggtgactaggaggggcacaggtagcatctgggaggctgggaatgttgtttcttgatctgggtgctggttacatgggtgtgtttgctctgaaagtcgctgggttagacagttatgctttctgtacttctctgtacatgttataaaaagaaattggctgggtgccatggtgcacgcctgtaatctcagcacttcgggaggctgaagctggaagatcacttgagctcaggagtttgagactagtctgggcaacatattgagaccccatctctacaaaaaaatatatatatataaaaatttgctgggtgtggtggcacacgcctgtaatcccagctactcaggaggctgaagcaggaggactgcttgagcctgggaggtgaaggctgcagtgagccaagatggagccactgctctccagcctgggcaatagagtgagaacctgtctcaaaagaaaaaaaaaagaaagaaagaaagaaattaatggcgggggaacccccactccatcttggacatcattccccatcagcccaccaggcacgtccttggtctttatgtggctacagattcatccctgaatgaacacaactcttggatttgacacctgtggacagacatccttgtccactatgacaaagcagtttggtacccaatgtctagcacgtgtccaaggatgtttttcagataaattctttttttctttctttcttttcttcttcttttttttttttgagacagtctcgctctgtcgtccaggctggagtgcagtggcgcaatctcggctcagtgcaacctctgccacccgggttcacgccattctcctgcctcagcctcccgagtagctggcactacaggcgctcgccacc[184 bp omitted]aatacagtggtacaatcatagctcgctgcagcctcaaactcctgggctcaagtgatcctcccaccatagcttcccaagtagctgggaatacaggcatgcaccaccatgcccagctaattttttatccaggcagggtcttgctatgttgtccaggttggtcttgaactcctgggctcaagtggtcctcctgctttggcctcccaaagtgctaggatgaagggtatgagctactgcacccaaccctgcttttaagataaattttaaaagtggaataactgattcaaagggtgtgtgcatttaaaatgtggttagaggctgggctgagtgcagcaatgtttacaactaattgatcacaaccagctacagatttctttgttcctttccacttccactccttcacttgaccagcc[132 bp omitted]gcctcccaggttcaagcaaattctcctgcctcagcctcctgagtagctgggattacaggcgcgcaccaccatgcccagctaattgttgtatttttagtagagatggggtttcgccatgttggccaggctggtcttgaactcctgacctcaggtggtccacctgcctcggcctcccaaagtgctgggattataggcatgagccaccgtgcccagccaaaaaacttttttttttttttttttgagacggagtctcgctctgtctcccaggctggagtgcagtggcgcgatctcggctcactgcaagctccacctcccgggttcacgccattctcctgcctcagcctcccgagtagctgggactacaggcacccgcca[186 bp omitted]cagactgcacaggtctatatacctccaacaacatgagagagccactcctcacaactttgccccagggcttcctgggactggctctgagctgtgcctgggtcagcaaggaacctcctgcaccatgctgtggaaaatgtgccatcagtgagagactgggagaagatacttgtaatgcctacaatcaacaagggactaatatcattttcatttttattttatttattttgagacagaatcttgctctgtcgcccaggttggagtgtagtagcatgatctcggctcactgcaacctctctgcctcctgtgttcaagcgattctcctgcctcagcctccccagcagctgagatgataggtgtctgccaccaggcccggctaatttttttgcattttttttttagtagagacagggttcaccacgttggccaggctgatctcgaactcctgacctcaggtaatctggccaccttggcttctcaaagtgctgggattacaggcatgagccaccacacccaaccaacaagggactaatatgtagaatagtcagttctactataaggcatgcattcatagaaatcacagcaatatgcaaaatcctgcagtcaaaaaccacaaggcttacagagaaaacaggattgtgtcacaatcctcgtaaactttgtcggtgatgcttaaagaaaaagataagaacagaatacaaaaggagagaacagtttcacacgggctaggtggttaagacataccaacatactccaaaaatatggcagttgaccttgacaaagacttgaagtttgttgtggcaatgggtgtggggtggagggagcgccttgtgaattactgtgatgtggtggaaagagggttatttgagatctgatggaaagtcctagtaccagatgtggatgggtgtggctcctaacacccggggaactgcggtggtggtatttgtttgaagtgccgtgtatgtgtgctttgtgtattcccacacacacacttatagcagagtgcagtttcctggattcaccttggatgcacataagcaaatgtgaaattggtgttatgctcaaattgttccctgatatatcaactgcattggaataaattcacattttcaaaataagcattatagcagaactgatggtacatgaaactccagcaaatcaagaagaaaattacagccactccaatagaaagatgagtaaaagaggctgggtgccgtggctcatgcctgtaatcccaacactttgggaaaccaaggcaggaagattgcttaaggccaggagttcaagaccagcctgggcaatatagctagaccccatctctaaaaaaaaaaaaaaaatagtttgtttgtttgtttttttttttgagacagagtcttgctctgtcaccaggctggagtgcagtggcgcaatctcggctcactgcaacctccgcctcccaggttcaagcgattctcctgcctcagcctcctgagtagctgggactacaggcctgcaccaccacgcctggctaatttttgtatttttagcagagatgggctttcaccacgttggtcacgatggtctcgaactcctgacctcgtgatctgcccgccttggcctcccagagtgctgggattacaggtgtgagcccactgcgcccggcctgggaggatctttaaatcataatgcttagtgagaaaagagtaaaacaagagctcaataccatgtaggcacaggaaatctactgtgcatacaatgatactttttttttttttttttgagacgttatctcgctctttcacccaggctggagcgcagtggcacaatctcactgcaagctccacctcccaggttcacaccattctcctgcctcagcctcctgagtagctgggactacaggcacctgccaccacacccagctaattttttttattttttttttagtagagatggggtttcaccatgttagccaggatggtcttgatctcctgacctcgtgatctgcccgcctcggccttccaaagtgctgggattacaggtgtgagccaccgtgcctggcctacaatgatacattttaaagaacatttggccgggcacggtggctcacacctgtaatcccagcactttaggaggccgaggtgggcggatcacttgaggtcaggagttttgagaccagcctggccaacatggtgaaaccacgtctctactaaaaatacaaaaattagccgggcgaggtggcaggcgcctgtaatctcagctactcaggaggctgaggcaagagaattgcttgaacccgggaggtggaggttgcagtgagccaagatcgcgccatcgcactccagcctgggggacaagagtgagactttgtctcaaaaaacaaaaacaacaacaacaacaacaaaaaagaacacttgcaggtggggcgaggtggctcatgcctgaggtgagcagatcacctgaggtcaggagttcaagaccagcctggtcaacatggtaaaaccctgtctctaccaaaaatacaaaaatgagccagtcgtggtggccacctgtaatcccagctacttgggaggctgaggcacaagaatcgcttgaacccaggaggcggaggttgcagtgagccgagactgtgccaatgcactccagcctgggtgacagacactcatctcaaaaaataaagaaagaataaaatataaagaactcttgcagacaaaaggctccacatgacacatattagttgcattcaggaaagattgtctcctgctctcaagtagcctgcaagtaggatccagaagttggggtggggagcacaaccaagggtcccaccgatgtaaaaagcaacttcatctctatcgcccccttctggttgctttgaaaaacttgcctttcccattcaaaacttgaaacacaaacctctgggagctatggagctctctctccccctactggcgtcttctcagaagccactctttgggttttaggtatatttacacagaatcaaagcaaagacctttacagttggatgcgatctgacaaatgtatacacccttgtgaccacgaccctatggagatacagaaccttcctatcacgctaaataccccctcacgccccttcccgatcaatgtgccccctgaggcagccagggctgcttgcagaagggcgaccttgatcaaacaccccaacttgacccagggtcccctccacatgccaggctcctcctccgacttccccctgacccccaagcttctcagtgaacgtccaacacctgttgcctcccctcacctgccatccgctccccagcccccacaactgccactcatgaaggtcacggtgaccttttcatggacacattccccactctattcttagttgtcaactcccttgaccctctgcagtatttggctctgggcacctcggctttcccagagatgagcttgcttgctgttttgtggccaagaactgaggtttctacatagatggggacattttccctccaaaaataggaggaacacctatagagggagcatttaaactttttttaatttaatttgttttttttgagatggagtcttgctctgttgccgaagctggagtgcagtggtgtgatctcggctcactgcaacctccacctcctgggttcaagcaattctcctgcctcagactcccaagtagctgagataacaggcgcccacgcccagctaatttttttttttttttttttgtattttttagtagagacagggtttcaccatgttggccaggctagttctgaactcctgatctcaagtgatccgcccacctcagcctcccaaagtgcaaggattacgggcatgaaccactgcacccggcaaactctttgatttttaaaactcagtgatttttaagatcctgagaccagaaagcgtgagcgcctccaaccaagggtggaagaatagccagtttcaggatttacaaactctgaaagctgagctctcctgccccacactatattgtctctttggtaggtccaatttcaaactacaaagcagactgctgccatctgctgtcaccagcatttcagagaggaaacaggcaaagagcaggagcgaccgatgtcagcataatccctacctcacagcacaggaaacaggctcacagcatgtcccagctgggaaatggcagagctgggactcagacccaggcagccaggctctggagccattccttttaactaggtgacaactgtcagttttcctaggaaagtcacaatctcagaaaaaaggccaatcaggctggccacggtggcttaaacctgtaatgccagcactctgggaggctgagacgggtggatcacaaggtcaagatgttgagaccatccaggccaacatggtgaaaccccatctctactaaaaatacaaaaattagctgggtgtgttggtgcgcgcctgtggtcccagctgctcgggaggctgaggcagaagaatcgcttgaacccaggaggtggag[133 bp omitted]tctttcagcacatctcagtaatttcagtaattcagatgctaaattttcttttttttttcttttttttttgagatggagtttcgcttttatcacctagggtggagtgcagtggtgtgatctcggctcactgcaaccttcacctccccgattcaagtgattctcctgcctcagccttccaggtagctgggattacaggcacccgccaccatgcctggctaattttttgtatttttagtagagatggggtttcgccatgttgggcaggctggtctcgaactcctgacctcaggtgatccacccgcc[142 bp omitted]acctccagggctcaagccattctcctgcctcagcctcccaagtaactggaattccaggcgtgtgccaccatgcccagctcatttttgtatttttatatttgtatttttagcacagatggggtttcaccacattggcctggccatcagatgctaa[134 bp omitted]aatgtggcgaaaccctgtctctactaaaaatgcaaaaattggctgggtgtggtggcaggtgcctgtagtcccagctactcgggaggctgaggcaggagaatcgcttgaacctgggggcagaggttgcagtgagccaagatcgggccactgcactccagcctggccaacagatcaagactgtgtctcaaaaaaaaaaaaaaaaaaaaagcccggctctgaagcagaccctggctctaagcattttactgaatatcataacacctcaaacggtcgaatatcacaacactccactgaatatcacagcacctcaaatagttgctataaatgaagagaggcacagaggcggtgccctaggttatgcagctagtgagtcctacagctgtgtttgatccaagcacctgtggctttgaccatccactgtgccagctggctgcaggcggcctcaggcactgtgctgaactctgggagtggatcagacagctagtgtgtgtcttgtcctcccctgaaatcctgtctcctttctcctccagagcactgccaaggtttgcctcctccaagaagcctgcctctccgggatcagttaggttctccttgcacttgaccgtgccctgagctacctccgttacagcccgtccctcggtatttcggctccagagtaggggccctggttggtggggcctgggttgaacttcagcctgggtcccagcattgcctggcacctgggaggtctcagagatgtcatgatagaatcaatgaaccacctccaatcctagggccaggggaggtgggttagcaatgaactaaccatgcagccatgacatcatgccattaatacactaataattcattagtaacatgtgaatcacagaagcactggaagaacagaagtaatcatcacatccttcaaccccttaagaatcagaccttgtgggaagcactttccacatgtgaacacattcggtcctcatgacaacctccccacgttctgcccatttattttattttatgtatgtatgtatgtatgtatgtatttattttggagacagtctcactgtcaccaggactgaagtatttttttttttttttttttggagacggagtctcactctgtcacccggactggagtgcagtggcacgatcttgactcactgcaacctccacctcccaggttcaagtgattctcctgcctc[215 bp omitted]cttggagaaattggcctcttcctcagtctattccttgacaaaccagcctcaggggggcttttcagaatggaagtttgattaagtcactctcttcaactgcttcttggacatgactcaagacaaaaaccaaattattcagactaagtgtaagagaaatgggagaataggaaaactgccattttgcaacctctggtgaaatagctgactcaggcaatgattgttgatggatggcattaaaggagaggctgatggggcctggatagtcacaggatgctaattcttgctactggaaaatacacagttgtagctttacaatgcggttttcgatggctgccacctgtctcagtctgctccagctgccataacaaaacaccactctgggtggcttaaacaacagacctattttctccagttcctgaggctggaagtctaagttcaggctaccagcattgtggggttctggtgacaccctcttcctggtttgcagatggctatcttcagtggcagagagaaagctctctggtgtctccttctgttttttgggaggagtctcactttgtcacctaggttggagtgcagcggcggatctcgcctcccaggcccaagtgaatctcctgcttcagcctcctaagtagctgggattacaggcgtccaccaccatgcctggctaattttttttttttttttttgagacggagtttcgctctgtcacccaggctggagtgcagtggcgtgatctcggctcactgcaagctctgcctccagggttcatgccattctcctgcctcagcctcccgagtagctgggactacaggcgcccgccaccatgcccggctaatttttttgtatttttagtagagagggggttt[141 bp omitted]ttggccaggctggtcttgaactcctgatctcatgtgatccacctgccttggcctcccacagtgctgggattataggcatgagccaccatgcgcagcctcctcctattataaggacaccaatccatcagattagggccccactctttcaccttaattatctccacaaaggccctacctccaaatataatcaccttggggaattagggcttcaatatacgaatctgggggggacattcagtctataatgctgcctgagcctgaatgaatttcactacccctgaaaatggggcacccaggcagtatgcaacatgaagcgaccagctctgaagtaatcacctgacagctgaatggaaatttaatcaagtctttacattcaatttcctgattctaggaagtcagaggatatagcagggaataacaaaaaagggccagagagtaaatgttttgaactttgcaggccaaacagcccctgtaagtactccactcagcccctgtagcataaaagcagccacagacacacaaacgggcatggctgtgttccaataaaactttacttttagactctgacacggaatcacatataattgtcataggtcaccaaattcattc[137 bp omitted]ggtgaaaccccgtctctactaataatacaaaaacaaaattagccgggcgtggtggcgggcgcctgtagtcccagctactccggaagctgaggcaggagaatggcatgaacccgggaggtggagcttgcagtgagcggagatcacgccactgcactccagcctgagcgacagagcgagactccatcttataaaaaaaaaatgttaaaaaccatttttagtttgcaggctgaacaaaaacaggtagcagttacaaaagtcagatatctcctggctgttgtggctcatacctggatagggtgctttgggaggcaaaggcaggaggatcacttgaactcacgagttcaagaccagcctgagcaacatgccaaaaccctgtctctaccaaaaaaaagcagcagcagcatggtttttgagaccagacttgaacttgctatgggcaacatagcaagactccatctccacaaaacaaaatttaaaaaattagccgggcatagtggcatgcgcctgtggtcccagctacttgggaggctgaggcaggaggatcacttgatcccaggaggttgaggctgcagtgagttatgatcgtgccactgcaccactgcactccagactgagtgacagagtga[131 bp omitted]agaaaccccatctctactaaaaatacaaaattagctgggcgtggtggtgcatacctgtaatcccagctactcgggaggctgaaatgggacaatcacttgaacctgggaggcgaaggtcgt[135 bp omitted]actcaataatgaaaggacacctaacacaatttgaaaatgggtaaaggattggaatagacagttcttcaaagatctacaaatggccaataagcatgttaaaagacaccagttcacaccccctagaatgactataatcaaaaagataaataataagtgctggtgtggatatggagaaactggaacccttatacattggtggtagaaatgtaaaatggtacagccattctggaaaagtcacagtttctcaaaaggttaaatagtcaccttttgacccagcaattccactgccaatagaaataaaaacatacatccatgcaggcggggcgcggtggctcatgcctgtaatcccagcactttgggaggccaaagcgggcggatcatgaggtcaagaaatcgagaccatcctggccaacatggcgaaaccccatctctactaaaaatacaaaaattagctaggcgtggtagcgcatgcctgtagccccagctagtcgggaggctgaggcaggagagtcgctcaaacctgggagccgagatcacgccactgcactccagcctgggtgacagagcaagactctgtctcaaaaaaagaaaaaaaaagaaaagaagtatatcttgggtaaaggaatattatccagccataaaaagaataaagtagctggctgggcgccgatggctcacacctgtaatcccagtactttgggaggccaaggcaggaggatcacttgaacccaggaggttgaggctgcagtgagccatgatcgaaccactgcactccagcctgggtaacagagcaaggccgtgtctcgggaaaaaaaaaaaaaaaaagaagtattgatacatgccacaacataggtgaaccttgaaaacatgctaaatgaaagaaggaaggcagtcacaataatattttatggtttcatttgtgcaaaatacccagattaggcaaatccacagatatagcagagtagtggctgccaaagactggggtgggaaggattgggaggaaatagggaatgactgctaatgagtaccagggtttctttttgggtgatgaaaatattcttaaaatgatagtgttgatggttgcacaactctgtcaacgtactaaacaccactgaattgtatattttcaatgggtgaactatatgttaggtaaatcatatcccactaatgctttttttttttgagagggagttatgctcttttgcccaggctggagtgaagtggcatgatctcagctcactgcaacctctgtccctagggttcaagcaattctcctgcctcagcctcctgagtagctgggattataggtgccagccaccatgaccagccaatttttgtatttttagtagagatgaggttttaccatgttggccaggctggtttcgaactcctgacctcagatgatccacctgccttcacctcccaaagtgcaaggattacaggcatgagccactgtgcctgcccaatggggatttttaaaacaggtagctggcaggatttgagtttggtctgtagaacataattagctgatccctggcatgaggaaacaagtaaaatgaggccgggctcaatggctcacacctgtaatctaagcacagcactttgggaggccaaggcaggaggatcgcttaagcccaggagtttgagaccagcctgggcaacatagtgacaccttgtctctatctattttttcttttttttttttg[134 bp omitted]tcatgcccggctaaggggtttcaccgtgttagccaggatggtcttgatctcctgatctcatgatccgcccgccttggcctcccaaagtgctgggattacaggcatgagccactgtgtctggcctatttttaaatacttaaaaaaaaaaagaaagaaaacagaagcaggtaaaatgagaccacaaaaaagcaaacgggacaaattcagatggtgggatgatcaactgaactagaattagtttcttcaatgaatcgattacaccaagaaataaccaaagtggagtggaagggggaacagttctaaattaagagagatgtaaaagacgatagcaattacttaactatatcctgattccaacaaacccacagttacactggacttgactctgcaccacgtaatggatagtagtctagaattacggttgttcttttaaagtgtgatgatggtattgtggtcatatcagcaatgtttctggtttttacacacgcaccctgttagataaaatttatagaaggtcattggtttggattgagctcctgcactaggttcaacagaccaaaccaaaatggagacactcatgctaaagttccatgcttccaagccaaaactaagttgatatctgatcttctgagatatcaggagagagataatagccaaatccccaaacaacccagttttagcccacctgataaaggaagtcccctctactttaacctttaacttagaaatttaatcaagttaatcaatttaatcaactagctttttgttttccgtttctgattttctcagccctttgtctctgaaaacaacctctgctcagctcatcggaacactcacgctattttccataattagatgttgtttgattgtagattcacgaataaatgccaattaagatcttctcactaaatgtgttgcaattttgtcttttgacaatccttaagtgtcatgatgcctacgatttgttttaatctctttaagtttaaaaaaatacagcaagtatggcaaaaataatcattggtgatttgggtgacaggaattcctgtattcttctctcacttttatataagtttgaacattttcgtaagaaaacattaacatcaaactgcctcaaggaccgttcaagccccaagttcacagaattagcagcacaatcagaatgggaatccatgactgcctgaccccgaagctccacacaagaaaacgtgaatccctgcaccaaccccgaaagggaaggggctgtcaaaaaggtgaagagaaggtggcgatggatgactgcacaatctagtatcgcccgccgtcccaccacagtctgagaaactgaggccaggaaaggagttctccctcctcaactcccactccttagacccccagcaatcccagtccactccttcccttgggaccaccagcaaatagccatcatctacagcagaactgtaactctcaggagaactggccgatgctagctaccacttgactgagtttatagtgagagagagagacaaagagagagagaactgcccgatggacggttggccacctccagcagagtgtagttcagcttcaaacttggggcgcccggacagctgtattaataatgattgacagggaatcgggaatccaaaatcttgccccagtctccctcaagaccccaggcctctagcccgcaggaaagcgatcccagcaacactcttcctgcaccgcctcgaactcacctcactaacgactcccagtccctcggtcgcttcttcaactgtgccccgacaccggaaaggagcactattttccccctccgctccgcccacttccgcccagcagaaggcaccggaagtagagctgcccctagttgcggaagtgcctcgcctggcttgctcaagtcctctcttctctttctctctccggaaacgtgagtagctaatcgaaagttccggatattgaaactggtgggaatatggggaacgcttactatgtacgaggcatttcccagggagatcgttttttcctgcttggttcccaggttttgagtctctccaagcccaaatttaaggactaatcacttcccctagagatcgggaagcccactttcccaaatatatcatccacttttcttgctgcatcttaaaacaattgagaagagacaactacgctcccattttacagacagagccattgggaaattgaaaatcaaagccgttcaagtcgctctcaggaaacagggatttactgcggcactgcccagctgtcccagggactaaggcatatcgttcccgctagtttctagatacctagagacctagatattaatttttctagctcggacagacgaactcccaggggagagccagagcgggtaggggtcgggagggaggaggagggtcgaatctaatcccccaggtatcccatggtattcgacaccttggcttcctcatggagctctggcctttaagtcctttatcccaaggtccctttaaatactttgtcccttacctgagtcccgcccagggcaggtaatggcaagttccgcccacctgccagaaacggggatcaggcctggttaccgggagtggggcgcccctcctccttatcccctcccctcttccctgtcccctttcacagctggctgtagctggccaaggagttctcgattaaagaggaaggggcagtgctcacatttctgggcaggtaagtgaatgtccctggaggaagagcctggcttggggacccaggcatcctggctccccgcccctccgagacccagaagtttggggctcctaggcccaggagtccagggcccctgcccacttaggtccctagacccaataatataactaatcccctgcctctgcctctctcgtaatctttgttgtctgtgggtggatgtgacaatgagcacagaaagaggcacaagtggaaattaccaggaagggaagactccagatcaccagtggacatgtttataagcatctgtgtcaggtgctgtagacacagtggggaaagaaagataagctgcctgctccttgctttcttctctggcggacactgccttcactgaaatcctggctctcacacttgcacactgtgtgaccttcggcaagctatattacctctctgtgcctcagtttcctgttc[143 bp omitted]tctactaaaaatacaaaaaattagccaggcgtggtggtgcgcacctgtaatctcaactacccgggaggctgagtcaggagaatcgcttgaacccaggaggcagaggtcacagtgagctgagatagcgccactgcactccagcctgggtgacagagcgagactctgtctaaaaaaaaaaaaaaaaaaaaactcctgtgaaaagttttgttttgttttgtttttgacatggaatctcgctctgtcacccaggctggagtgcagtggcacagtctcggctcactgcaacctctgtctcccctttcaagtgattattctggctcagcctcccaagtagttgggattacaggcgcccacaaccacgcctggctaatttttgtatgactcctgtgaaaagtaaaatgagttgaggccgggcacagtggctcacgcctgtaatcccagcaccagcactttgggaggctgaggcaggcagatcacttgaggtcaggaattcaagaccagcctggccaacatggtgaaacc[132 bp omitted]ggcatggtggccggcacctgtagtcccagctactcgggaggctgaggcaggagaatggcatgaacctgggg[131 bp omitted]ggctgaggcacgagaatcgcttgaacccaggacacagaggttgcagtgagctgagactgtgccactgcactccagcctggctgacagagcgagactccatgtcaaaaaaaaaaaaaagtaaaatgagtttatataggtaaacagtatctggcacagaatacaggctgtgtaagtggctgctattattgccattcgtggaccacagaggccagtcagagaggcactgcctcattacccagggactaaggcccttgtcagctgtaacaaacctggttctaggtgtctggaaaatatgaggggccacccctctctgctgctgctatatatggcattaaccacctgcctggatacttcacccagtgaggagacagaccaaggtgagtgtttgggggaagtggcatccagacacttggcgttggcctccccctgactcaggaatgtttctagtccttcctcttccaggagtccaggacccagccccttcctccttcagacccaggaatctggattcccagcccctgctccttcctccaggaccccactgctttccatccccctatgactccagccctagggaccctccatttttctgtccctcatgtctttgggtccagaagtcttcctgggtcccccagaggcccagagcttcctgagtagccatacccggattccaagagccaaccactgggacctggagctgctcacaccagggaacctggaacgggagtgtctggaagagaggtgttcctgggaagaggccagggagtattttgaggacaacactctcacggtgagggcctcgagaccctggagtttcgggccctctctcttctctatacctgtggggaggttgcaggggtaggttctggccttcagctccctcctccttggtgtctcagaaatcaggatgggctagtttgggggtgtgaacctcccagctgaattcctgctttttccccttcttttccactccttccccctcaaggagcgcttttgggagagctacatctacaatggcaaaggaggtgagtgaggggctgaagccatcttgttctgtgcagctaaggtagtcccttcccagcgaggccaaaccaacgtcctccaccccaaattaggtacaagaatcgtctgccccccaattctgtgctctctgaagctggctgctaaaggagttccctcccttaagaccccagctt[135 bp omitted]ctcccgggttcacgccattctcctgcctc[224 bp omitted]aggctggagtgctgtggtacaatcttggctcactgcagcctcaacctcccgggctcaagcgatcttcccacctcagcctcctgagtaattgggactccaggcacacattaccatggtaatttttgtagtttttgtacagacggggtctcactatgtggcccaggctggtcttgaatgcctggcctcaagcaatccttctgcttcagtgtcccagactgctgagattataggtgccaggccccccaccacatcttattggacgcaagtcctgtgtccctaggaagggaaaagtgtcagtggagggaaaggttagagctgtggggcccgtcaggccttaggctcagaggggcaggcccacctgaacccttccctggtgtccagagtaagtggaaagaccagcccctccggcagcttgattgctggggacacagccctctagcaacacgaccaagggaggaagcctgcccatcctcacctgcccattttgcccccaagaaccccttctctgaggggttgccatcttgttcccatcttgttgccagccttgttgctaaggggggctgctccttagcaacggggcctggccaggccagaccagacgaagaagcctgaagcagtacctggctgatttcccctcccccacagccccatcccagcagctgcctggttgctaaggaggccttctccctagcaaccacacctagccaggctccaggacccaaggccttctgcccactggaggaccaccctccgggcctccgatgccccacccccttgtggcccggttgctaggggtagctgcaccttagcaacaggcctaggtctgggctggagtctcacattggagcctggttgctaggggaggtaactctttcctgacaggcctagcgaggcgtagtggctcctcgaatctacctgaaggtgcccaattcaggaggacctgccttctgaagctgcacttgcgccttttgctaaaggggctcaaaagtctgggggtttactgtggtcagatgtggtggctcatgcctgtaatctcagcactttgggaggccaaggcaggcggatcacctgaggttcaggagttcgagatcagcctggccaacatggtgaaacccatctctactaaaaatacaaaaattagccaggtgtggtgatgtgtgcctataattccagctactcaggcggctgaggcacaagaatcgctgcagctgggaggcagagtttgcagtgagcagagatcgcaccattgcactccagcctgggagatgtctcaaaaacaaacaaatggctgggcgcggtggctcacacctgtaatccaagcactttgggaggccgaggcaagcagatcacctgagttcaggagtttgagaccagtctggtcaacatggtgaaaccccatctctactaaagatacagaaattagctgggcatggtggcacgtggctgtaatcccagctattggggaggctgaggcaggagaatcgtttgaacccaggagctggaggttgcagtgagccaagatcacaccactgctctccagcctgggcaacagagtgtctccaaaaaaaaaaaaaaaaaaaaaaaaacaaggaaatggggtcattttgtcacccaagctggagtgcagtggcacgatgacgactcactgcagcctcgacctcctaggctcaagtgatcctcccacctaagcctcctgagtagctgggattacaggcatgcaccaccacgcccagatacttaaaattttttttgtagagatgggggtctcactgtgctgtgttgtctacgctgctctcgacctcctaggctccagtgatcctcctgccttggcctccaaagtgctggaattacaagtgtgagccaccaagcccggccatttttttttttttttttttagagacagggtccagtcacccaggctggagtatagtggagtgatcctggctcactgtagccttgacctccttgggtcaagtgactcttcttcctcagcctcccaagtagctgggactacaggta[138 bp omitted]agtgaaaccccgtctctactaaaaatataaaaattagctggatgtggtggtgcacacctgtagtcccagctacttgggaggctgaggcaggagaattgcttgaacctgggaggcggaggttgcggtgagccgagattgcgccactgcacgccagcctggtgacagagcaagactccgtctcaaaacaaaacaaaaaaccaacattttttccccaggctcagtgatggctcatgcctgtaatcccagaactttgggaggtagagattggtggattgcttgagcctaggagtttgaggccaacctgggcaaaaaatacaaaaaattacaaaaacacaaaaattagccaggcatggtggcacacacctgtggtcccagctactcaggaggcagaggtgggaggatcgcctgaaccctggagaccaagtggcagtaagccgcgattgtgccactgcactccatacagagtcagaccctgtctcaaaaaaaaaaaaattttctttttttttttggtagagcctccctatgttgcccaggctgggctcaagtgatcttcctgccttagcctcccaaagttctgaaattacagctgtgagccactgtgcctagctacaatgaataattttaaaagcgtattccaagtagtacatgtgacatccttttttttttttttttttttgagggcgacagagtctctctctgtcatccagcctggagggcagtgagtggcacaatctccccggctcaagcgatcctcctgcctc[133 bp omitted]aaaacatctgcctcctgggttcaagtcattcgcctgcctcagcctcccaagtagctggaattataggcatgcgccaccgtgcctggataattttgtatttttagtagagacagggtttct[144 bp omitted]cgggctggtctcaaactcctgacctcaagtgatctgcctgcctcagcctcccaatgttctgggattataggcatgagctaccacacctggccaggacatagttttgtttttttggtttttgtttgtttgtttgttttgtttttttttattttgagatgaagtctcactcttgttgccctggctggagagcaatggctcaatctcggctcactaaaacatccacctcctgagttcaagcgattctcctgtgtcagcctcccagataactgggattacaggcatataccaccatgcctggctaatttttttgtatttttagtagagacagggtttcaccatgttggccaggctggtcttgagctcctgacctcaaacgatccacctgcctaggcctcccaagtgctgggattacaggcatgagccactacatccagcctaatctcattaggtttttacagtggggtaggggttatggttcccattttacagaactggcagtggagggtcagagaaaggaatgaggtgaatttcctgaggtcacagggctaggaagggaccccagctctgcctgcttccgggtccattctcttccctcagtgggaaggaattttgatgttggggtgggtggcagtccccgagacagtgtctccccttccctactttcctgcagggcgtggacgagtggatgtggccagcctggctgtggggctgacaggtggcatcctgctcattgtcctggccggcctgggagccttttggtatctgcgctggcgacagcaccgaggccagcagccctgtccccaagagtaagggggcttcagcgaggagggggtggtggtggagagcaggggagggaggaagcattgacctaaagggatgtgctaaggattgggggcaggcaggcactgatgaaagacctaaggacacagtcatttggagagtgagtctgtgagctggcttgtgtctggttttggcgactgtcgctctgtctggatcctcagtacctggcccgcagtaggagctctgaccacttttgctgccagcctgtctttgcggtactgagattaccagtatccgtggaattacgactctggatattgtatctggtgaggctgcgacggtgcagcctgtggtgtcttggtgtctgtggtatgtcagtttcagtggtaacaggtgcagcacctgagtgggtgtgggaaattggtgaggagtgcgtctgtgttgtgttcctgtctatatggatgggctgagttctgtctgtttggtgtgtgttggcctgcctctctacagggctgtctttttttttttttttttttttgagatggagtttcactctcattgcccaggctggagtgcaatggcatgatcttggctcactgcaacctctgcctcccgggttcaagtgattctcctgcctcagcctccagtgtagctgggattataggcgcactccactacgcccagctaattttgtatttttagtagagatgggtttctctatgttggtcaggctggtttcgaactcctgacctcaggtgatctgcccgccttggcctcccaaagtgctgggattacaggtgtgagccaccacgcctggcccttttttttttttttttttttaaaaaaagacaaagtctcactctgttgcccatgttggagtgcagtggccggttcacagttcactgcagcctcaatttcctgggctcaagaaatcctcccacctcagcctcctgaggaactagagctacaggtgtgcgccatgcacccggcagggctgtctttttctctattgctctgcctgtatctggtgcacatgagtgtgtctgaataagagtgtgtctctgtggttgctgatttctgtgtctacctgtctgtgtgcagctgcctgtcatttgaggcgcttttctgtgtgtaaggctaggctgaaggtgaccctccttttctgaagtccacctcccttccagctctgtcccagtgtcaccctgagtctccgtctcctagatcccctctcttcctccctagtctaggtatcctgtaagttgcctctgctaactgtacctttgctgtccccagggccgggctcattagccctctgagtcctttgaaccctctgggcccaccgacgcccctgcctccacccccacccccacccccaggcctccccacctatgagcaggcgctggcagcctctggggtacacgacgcacctccacccccctacaccaggtatggggcgtggcttctgcccgggggcggggcgcagaggggtgggcacgttggaggaggaacctgggctcaggggcgggacttggaatttgggccttcttacctggggcggggcttggagtgcgggggcggggccccatgcaatggtctaggggcgtggcccagcgttgtatgtgtggagccgtataggagggtggggcctgtgcccagagggtcctggattggctgagacgccaagggcggtcggagtggtcctggttgaaggggggagaaaaacagccagatctttgactccctagtgtgcctttcctcttgcagcctcaggaggcctcactgaagagctgctttcgagacccggctctccgaaccgtgcccctgattcataccggattccggaagccgctaggcctcatagacgccgaagctggacttggagtggggaatggtgggagtaggggtcatccggcccgaggcctgccctggcacacgcgtttccgccgcgtatggatatacacatgttttcggcaacgtgttcccgtgtcctggcccctcacgggcccccacactctcctgaccgtgagggcactggtcagttccgcccccgtggtaggcagacgcgcggggaaattcggacccaggagcccagccccggctgtgccatcttgtgtatgggcagatatgacctgacagccccctccagtgccacagggtacgcacacgcagagccccgcctgtgcacacgcgtgtcttcgtgcactccccgtgcggtacaggggcacttcgtaacccagggaaagggcggggggcatatttgcaagcgcgctcggtgcgggcaggctcgcattgcacccagggagctggagttgagctgttcccctaaataaaaacccttcggaaaggagaccaaaaaaagcagaaataatgcaaaaaataataatgaaatgaactgcgatcccgggcgcatcggaactggttttctgtgcaaacgcgccctacacccccaggccctgctcgcgctcagtctctctctcactctccctttttttttttttttttttgcatttgcacgggattgtgggaggaagcggagcgcagccagacaccccgccgcccgcccccccttcccctcccccctcccccagccgccttgtgcaaagatggctgcaccgtgagcgcagaggaggaggaggcggcggcggcggcggcgagagagcgagcacccagcgcctgcacccaccccggggccgcccgggacgccccctcccgagcgcgcgcccccccttttctctcgcaagcgccggggcaaaggcggagacagcggggtccctcctccccccttccctcctctagggggaaccccccttcccccttccttggctcagcgactgcaccccctcccttgcccgcccctccgcccctgccccctccctcccccgcccggggccttcccgggccttcggcggctgcaaagaaaaaaagagagagagaaaaggggggaaaaaaaagcagcagcggagggagcggcggcggaggagagcgcgcgcgcgccccctccctccctccctccctccccctccccccaatttccaccgcggccaattcatggacaggaactaccccagcgccggcttcggggacccgctcggcgccggggcgggatggagttacgagaggtcagcgaaagctaggtaaggagctgagggtggcctagagaagggggccaaggggtgggagcccagccgggccgggccgggccgggccgggcccgcccggcgacgcgtgcatcgcaaactcccctccggcttgcaagggagcggccttcctcggtttgtaacaacgccgccgccccagtttgcaaattgcaaactccgccaaagccagctccggcatgcaaagggagaattgcagcgggaaaatgggggtgcaaaacaatttcggacgggaaggccttgggaaggtgggagggactggcgaagcaaggcctggacttccccccatccttggattcccggcttggtgacccctcccccccgcgccccaggcactgctcttgcaaaggtgggaagaagagaagaattagaacgcagatctggggggcgcgaaccccctctcaggtcctattgttccgggactgtgcgaggccgcgccactaggcgcccccccaagaattccgcgcgcagagtgggcacggggccccgcccccttcctaagctggggttgtgtgtgtgtaagggagggggtcaggcgtctgggacacgccccctttaatgcccccacccccaaaggcagagaatcctagttgatcgcaaggagtggagcgtttgccctcttgagtctggccacggactggtgccgttgcatgggaagagtcggatgtttcccgggtgtgtgtttgtgtgtctgagcgtgggccctgtgcgtgcgtggctggcagcgtgttcacctgtgaatctgcccctttcctgttgcttattggtgtggcgccctcacacttcacctatccccagcacctcccccccaacacacctggatttcccagcagggcataaccccaagtgtgtcaggattttccgtgtgggattcctccgtctatatcttttcttccccacgggtgagttggatacccgtttgcacacatacctggcattgcatgggcccatgcatttgaacctcaacccccggggatggtcggtgttcttgttcacacttgtacctggtactttccccaggtcttattccctcttctctccaccccccaaaccgttgccgcttgggaaccgatcttcctcctgctcccaacttgttctgcaccaccccatgaagttcagggcctatgtgttcccgtgtgtctacggaagaggaggcgtccatgtggacctctggcgttggccccatagcctgtgtcgccggaacgggggctggggggggtttgtggggtcgacgggggagggctctcatttgcaaatcaagacgcttgctctgccttggaccctcttctgtgtgttagtctcgtctctgagcatgcctgtttgtaaacgtgagactatccgggctctctttattcgggctctggagtgggggccatttctgtggctctttagttgagcaccccgattcccttgtgttctcccctttagggcctacggttccttagcttaacaccccccaccccggtcagctggaagggtccccccaactccccggggggttttctgagcttccttctcagaaggcagcttggaagaaccccctgacgtctcccctttccccccagcttggtttatggcagctccaggacctcgcaccccgagacggacatcttacaccgccaggcctatgcggccccccacccactgcaaagctatgccaccaaccaccacccggcaggtacggcccccatcccgccccgctttgggctggccctccccctccccccgaggcagctgattggctgttgaaagttccgcccctcctaattggccgtggcccgtgccgtggcccgccccttgctgtgtctcctctgattggttgcctttgaggctgctggtcgctgcttcatttctcgccggattcgtccgcccctgcctcgcccctcccctttcgctccaattggccctgttaccatcagcccccaaatcccaccttctcttccaggcttttccgcctctccccaacccaccccaattctttccctctgggtttgccctattcttttggctctttggaactctgaattctttcttcctgattccctttcttcctgattggctctaattctctggcccgccctgttttatcttattttgccccattgccttattctacccaccttgcctttgcctccaaggtttctgattggttccctcttcctaggggtactggtaatgacatgatgctgtccagtttgacccttgaccctcctgattggctccttccctttttccctccccatctttttttctgaaccctcccacttagctcaatcctttctgacacgttctctggtctttcttagacttcattgtcccatcctttcctcttccttgctggaaatatccaaatttggtctccctcccagccttactgaggactctgttcttttgctcctggctctttcgcttctagatttttctacacttttgtctaccatttcctacctgggccccctgtccttatgactggattgccccttgtcttgctttactgtctcacctttcccccttccctcccctcattcatgtctcattagcttggttctatccatcttgtttttgaatttgcccttttctctcccatcccctccttttcctgatccaacttgcttttggcctcttccctttctctcttgactgtatcctacccacccccacctggctgactataacccctgtccccggccaggcctctctggactcttcgacactggcctccaccacgcgggctcagcagggcccgacgcctccgtcatgaaccttatctcggccctggaatcccggggcccccagcctggcccctccgcctcctctctcctctcccagttccgcagtccttcctggcaaacaggtaagcccagcgccggccctgcagggccagggtgggactggctcgctgttctctctgacgcgcggtcttcctcatctccagccatgcacacgccaggccccacggagctcttcatctcgggtgccctgccgggttccagcacctttccgtcctcatctgccctgtcggcttaccaacacccggcttccttcggcagccgccccttcccagtgccctcgtccctcagcctccaggaccccccattcagccctccagctaacgggctcctgtcccctcatgacgtgctgcacctgaagccctcgcaggcacccacggtgccctcttcactgggcttcgagcgcctggcagggggcggtgtcttggggccagctggtctcggtccagcccagacccccccttaccgccctggccccccagacccaccaccacctcctcgccacctcccaactcagttcaacctgctggcttcctcttccgctgccgccgccgctgccgagcagtcctccccacagctctataacttctcgggtgctgccccgggcccaccgccgcctgagcgggccctgccacgccaggacacggtcatcaagcactaccagcggccagccagtgcccagcccccaccacccccgccaccagcccatgcgctccagcactatctgagctgtggaggcagctacccctccatgggccaccgggccaacctggcctgcagccccctgggtggtggggagccctccccgggtgctggggagcctagcaaggctggtcccagcggagccacggctggggcatctggccgggccacgggccctgaggcagcagggggcggtggggctgggggtggtggtggaggttaccgccccatcattcagtcgcctgggtacaagacgggcaaaggtggttatggagcagctgccgggggtgccaccaggccccccccaccccgttcgaccgccacccccaaatgtcagagcctgggtgggccagcagccgcctatgccactgggaaggcctctggggctggaggggcagggggccaggcttattcccccggtcagcctcaagggcttctgggaccccaggcctacgggcaagggtttggaggggggcaggcacaggacttgagcaaagcccccagctactcagggggccccccacagccccccagcggcccccctcctcctggcctggccacatgtcagagctactccccggaccagctgcaggggcagctgtatggggtgcagggcgagccatacccagggccagccgcccactcccaggggctgcccacagccagcccctcgctcagctacagtaccggccattccccagcgctctcgggccatgggggtggctggggacccagctccctgggaggcggcggtgaggccagcccatctcacatcattcgtccgctccagtcaccgcctgccaccggccgtccacctggagtcggctctccaggagcccctggcaaatacctgagctcagtcttggcctcagcgcctttcctggcacctccgggagctggcagctatgcagccggagcaggtggctacaagggcaagggggatggctcggagctgctggcgggcccaggtgggcctcctgcggagcgcacagaggatgaggagttccttatccagcacctcttgcaggcgcccagccctcctcggacctcaggggcggacggcttggtgggcgaggacggggcagcagatgcctctaagggacttggggggagtggcggggccgggggaccaccgggtacaccctacgagttggccaaggaagacccccagaggtaccacctgcagagtgtcatccgcaccagtgccagcctggatgagggtgccactgcggcactggagctgggcctggggaggctgaaggagaagaagaaagggccagagcggggtggcgagacccccgaggggctggccacctctgttgtccactacggggcaggcgccaaggagctgggggccttcttgcaaaagagccctccgcccccacctcccacggcccagtctacccagcccactccccatggcctccttctggaggccgggggccctgacctcccactggtgctgcctccgcctcccccccagctgctcccctcggtcctcagccatgcccccagtccctctcccagcgcctccaaagtcggcgtccacctccttgagccagccacccgcgatggggcaccccagccacctccaccgccacccccgcctccaccacccatgcccctgcagctcgaggcccacctccgcagccatggcctggagcccgcggcccccagcccccgcctgcgacccgaggagagcctggatccgccaggcgccatgcaggaattgctcggggctctggagccgctgcccccggcgcctggggatactggcgtaggcccaccaaactcggagggcaaggatcccgcaggcgcctaccgcagccccagcccgcaaggcaccaaggcgccgcgtttcgtgccgctcacctccatctgcttccctgactccttgctccaagacgaggagcgcagcttcttccccaccatggaggagatgttcggtggaggggccgcggacgactacggcaaggccgggccacctgaggacgagggggaccccaaggctggcgctgggccaccccccggcccccctgcttatgatccctatgggccctactgtcctggccgggcgtcgggagccgggcccgagacaccgggcctgggcctggaccccaacaaaccgcctgaactgccctccacggtcaacgccgagccgctgggcctgatccagagtggcccccaccaggcggcgccaccacccccgcctccgccaccgccgcctcccgcgccggcctccgaacccaagggtggcctcacctcgcccatcttctgctctaccaagccaaagaagctgctcaagacatcctccttccacctgctgcggcgccgcgacccacccttccagacccccaagaagctgtacgcccaggagtacgagttcgaggcggacgaggacaaggccgatgttcccgccgacatccgcctcaacccccggcgcttgcctgacctggtctccagctgccgctcccgtccggccctctcgccactgggggacatcgacttctgcccacccaacccaggacccgatggcccccggcgccgtggccgcaagcccacgaaggcgaaacgtgatgggccaccccggccacgggggaggccccggatccgccccctggaggtcccgaccactgcggggcccgcctcggcctccacgcccaccgatggcgccaagaaaccccggggccggggccgaggccggggtcgaaaggctgaggaggcagggggcacccggttggagcccctgaagccacttaaggtgaggggaaat[138 bp omitted]cccgggttcacgccattctcctgcctc[211 bp omitted]gtttatggccgcaccttggcatttttggggcagggggataataaggtttacatttctaaaatctgtgaggaagttagcgtgaggaatttcagggtctcactgacagaaagacctaagaattgaaattctgaatctaggctgggcagtgtggttcatgcctgtaatcccagcgctttgggagactgaggcgggaggatctcttgaacccagatgttcgagaccagcctggtcagcgtagtgagaccctggtctctattaaaaacacaaaaatttagccaggtgtggctgcgtgtacctacagtcccagctactcaagaggttgaggtgggaggatctcttgagcccaggagttcaaggctgcagggagctatgattgcatcactgtggcctgggccacagagtgagaccctgtctcaagagataaaggaaattctgggtttagggagagaggcaggaggttggagcttacgctggtttgaaactcctgacctcaagtgatttgcctgcctcagtctcccaaggtgctgggattacaggcacgagccacctcacccggtctgcttgcttttagtttctatatcccaaaggatgggcattcagggatcctacattcctgggtctcatgggaagcgggtctagggacctgaactgggctgtaagtgaagaggctcagtgagtccaagttcctggtcttctgagggaggaactccagtcttgtcctcctagaatctaagacaaggggtctgcaggtttgaattctataaattcacaggctgagcacctgtaaatttggatttttgggggctgagggaggatgggactgggggcccaggctactgggccctcacggcccgccactcccatgtctagatcaagctgtctgtgcccaaggctggcgagggtctgggaacctcatcgggtgatgccatatcaggcactgaccacaacagcctggactcgagcctgactcgggagaagatcgaggccaagattaaggaggtggaggagaagcagccggagatgaagtcgggtttcatggcctccttcttggacttcctcaagtcaggcaagcgccacccaccactctaccaggcgggcctgacgcctccgctcagccctcccaagagtgtgccaccctctgtgccagcccgaggcctgcagccccagccccctgccacccctgctgtgccacatcccccaccttccggagcctttgggcttgggggcgccctggaggctgcagagagtgagggtctggggcttggctgcccttcaccctgcaagcggcttgatgaggagctgaagcggaacctcgagacgctgccctccttctcctcggatgaggaagactctgtcgccaagaaccgagacctgcaggagagcatctcctccgccatctctgccctcgatgacccaccccttgctgggccaaaagacacttccaccccagatgggccgcccttggcccccgcggctgcagttccagggccaccccctcttccggggctccccagtgccaacagcaatggcactcccggtgagctctgggcaggtggtctgggagtagagcttaaaggttattatgatcactaggtaacagttgtgcaggttacgcactgtttaagagacaccattcacatacatggtgtaagcttgcgtgtttatgaagggactttcctgattacacaagcattttgaggaaggtctatctttttctaattcactcagaggtgctaagtggactaggaggggccccaaggcagacactggagaatgcagggagacagggcaggtgataagttacagggacaggacaggggctactcaggttctgaatggtgggaggtgtgggaactgaggagggctctgagtcaactgtgtgtgaaggtacagaaagatgtctgggggcagagaaagacttggggatgggggtgggcggtggaagggaaggctaggggcataggaagggtttaggttgtgctctggttttggacacagtttaaggagtgtaatgtcagaaacagaggcattgggaaatgagaggtgggagcttacaggagggcacagaggggagtgttcaaaaaaaaaaaaaaaccatgacaggccgggcatggtggaccacacctgtaatcctagcacactttgggaggctgagacaggaggatcgcttgagcccaggaggttgaggctgcagtgagccatgattgagccactgtactccagcctgggtgacagagcaagaccctgtcttaaacaaaaaaccccaaaaacaaaacaaaaagaccctataacgttcttttttttttttcttgagacagggtctctctatgtcacccaggctggagtgtggagtgcagtggtgcgatcttggctcactgcaacctctgccttccgctcaccgcaacctctgccttccaggttcaagtgattctcctgcctc[134 bp omitted]cagcctcccaaagtgctgggattacaggcatgagccaccatgcctgccctctgtgaggttcttaaaaagcctgaagaagggagctggcagacaggggagaggttagcagtctgcatactggtgagcaggccaaggaaaggacaaagatggtcctggagggaggaggatgaggccttggaggaagaggaggtgaggaagtagagttagggaggtgatgatttaggagttgggagggtcattcaggaagaggagttaagaaccagacaagggctttaagaccacaaagagacattccaggactgagaaggggattagggataggagacaggtctcctttgcagccgcaggagccagagtaggtctctggagagactctgatagggtagaagggacactgggagctgagtggtagttacagaggggcttttggtatagaaagcagtgtttaaaggacaagaggaaaggtgccaggaatgatgaataacatccaggcctgatgtccctgtctcccccagagcccccgctgctggaggagaaacccccacccactccacctcctgccccgactcctcagcctcagcctccgccaccccctccgccgccacagccagccctgccctcgccacccccgctggtggcccccacgcccagctcaccaccgccaccgccgctgccgccgccacctccaccagccatgccctcgcctccaccaccacccccaccagccgctgccccactggctgctcctcctgaggagcccgccgccccgtctcccgaagaccccgagctgccggacacccggcccctgcatctggccaaaaagcaggagacggcggcagtgtgtggggagacggacgaggaggccggcgagagtggcggagagggcatcttccgggaacgggacgagttcgtcatccgtgctgaggacatcccttccctcaaggtgagtcccagccttctccagaaactgggcctgatgggtttggtcacctgtttgttgagtgcccgctggatgacaggcttgtgctgagacctgcagatccagtcgtggccgggccgccctggaatttgcagtcctatggggctgatagaggtgtcgaggacctgcgggcctcagaggtgttatttgcgtttgtgtctgtacatgcattacctgtatataaggtaaagcgattgttaacgcgtatgtgtctatatgtgcgttacctgtatataaggtgaaccgcttgttaatgtttatgcagataccctgctgtgggtggtagaggaccagtactgtacaagcagatgaggctctggccctagggagcttctagtttaatggaaccagccagagaggcgggctgctttgccatttatggcacaatggtggaaatgtgtcattgacatagactacctgcagatacacacttatgtaacctgtaaatataatcatgaattgggccggacgcggcagcttacacctgtaatctcagcactttgggagtttgagaccagcctaggcaacataatgaaaccttttctctcaaacaaacaaaaaaagtgaatcatttaggaatggttattgtgtgtcaggccatatctttttgtttttttgagatggagtttcgctcttgtccaggctggagtgcgatggctcaatctcggctcactgcagcctctgcctcccaggttcaagcgattctcttgacttggcctcccaactatctgggactacaggcgcaggccaccacacccggctgatttttgtgtttttagtagaaatggggtttcactgtgttggccaggctggtctcgaactcctgacctcagatgacccacctgccttggcctcccaaagtgctgggattacaggtgtgagccactgtgcctggctggccatagcttcaatatttaccttaaatacttaaatacgtaaatgcagaccaacagcctgttcactgcttccagtttgtctaccgcaggagcttgaaaactatggcccctaggccaaatccagcccactgcttgtttttgcaaataaagttttattggcacacaaccatgcccattcatttacatgttgtctatggctgtttttcccatatggcagagagctgggtagttagctggccctcaatggcaaaaaatatctctggctcatcatgaataaagtttgctggcctctactgtactgggttcactggacaaatagagttggatcagaggattaatgtgcaaggcacttgacaggggtaggtgttaccaggtgcccatggagtgctctgcacagggcatgcggctgagcaggtgctcaggaggtcagcccattctcaccctgatggtggcatggacgccaaggccattctccatgtcaatcattgtcattgattgtactgattatgatacaggattattgtttggcccttcgtgtacagtgtgacatttaatcttggcggggcatggcggttcacgcctgtaatcccagcacttcgggaggccaaggcaggtggatcacttgaggtcaggagcttgagaccagcctggccaacatggtgaaaccccgtctttactaaaaatacaaaaaattaactgggcgtggtagggcgcacctgtgatcccatctactcgggaggctgaggaaggaggatcacttgaactctggggtggaggggggaggttgcagtgagctgagattgtgccactgcactccaacctgggcaccagagcaagactccatctcgaaaaaataataataataataatttagtcctggatgttgttttaatttaatcttcgatgtgacatggagaaattatgggaagaattaattattaattataaggataataactatcattacacttttttcttttcttttcttttctttttttgagacggagtcgcccaggctggagtgcagtgacgcaatctcggcttactgcaacctctgctgcccgggttcaagcgattctcctgcctcagcctcctgagtagctgggattaccagcaagtgccaccacacctggctaatttttgtatttttagtagagaaggggtttc[131 bp omitted]ggcaaactcaaatgtattttttcctgtgttatttcaatctatttcattgtgggaaaagtaaataatagagcaggccgggagtggtggctcacacctgtgatcccagaactttgagagactgaggtgagaggctcacttgaggccaggagtttgagaccagctaggcaaatagcaagacctcacatctaccaaaaacaagggagcgagactgtctcaaaaaaaaaaaaaaaaggatattgacatcgtaggccaggtgcggtagctcacacctgtaattgcagcactttgggaggccaagacgggcagatcacctgaggtcaagagttcaagaccagcctggccaacatgatgaaagcccatctctactaaaaatacaacaattagccgggcatggtggcaggcgcctgtagtcccagctactcaggaggttgaggcaggagaattgcttgaacctgggaggcggaagttgcagagagccaacatcacgccactgcactccagcctgggccaaaagaacaaaactctgtctcaaaaaaataaagaaaaaaagaatattgacattgttaaatgaccgtcaccaccatccatctccaagttttatctttttatataaaataaacttgattatagagactactagtagcgttttacagggatggaaactgaggctcacacaggttaaaaagtccttctgattggggatttctatgcccgttttttctgagacagggtctcccttgttgtccaggctggaatgcagtgacgtgatctcagctcactgcaacttctacctccctggttcaagcaattctcataactcagcctctcgagtagctgggactacagaggatcccaccatggttggctaaattttgtatttttagtaga[143 bp omitted]ggcacagagagataaagtagccttcccaggcttttgtagcttgggatccacacccagccctgctggccctaggaatccgtattcttttttttgtttgtttgagatagtgtttcgctcttgttgcccaggctggagtacaatggtgcgatctcggctcaccgcaacctccacctcccgggttcaagcgattctcctgcctcagcctcccgagtagctgggattacaggcatgtgccaccatgcctggctaattttgtatttttagtagagatgggatttctccatgttggccaggctgctctcgaactcctgacctcaggtgatctgcctgcctcagcctcccaaagtgctgggattataggcatgagccactgcgcccagccaggaacccatattcttatccccgactcagccatgcaccgtgtacgttctagtcaaacgcagctgagccagcattgggtcaaatgaacagggccctggggcagggactttgaccatccccattttacagatggggaagttcacgttcagagaaagggagtcagtcgcctggccagtgccaacctgggattggagccagggccacctgacaccacctcccagctggcacggggcaggggagggggccaggcgaggactcagatgcttaaaatacaacttgagtgtgcattataatgggggcaaagccccacgcctttgccaaatgtacagaccttggggactcatttgtgggcctagagatggggcaggctgctggcatagttaagagcccagctttggtttaacctgactgactcaaatctctgccacttattattattttttttgtgtgtgtttttgagacagggcctcactcttatcacccaggctggtgtacagtggcatgatcatggctcactgaggcctcaaactcctgggctcaagcgatcctcccacctcagcctcccaagtaactaggactacaagcatacaacaccatgcctggcaaatttttttattccttaagtagagactggggtctcactctgttgtcctggctggtcttgaactcttgggctcaagcagtcctcccgtctcagcctcccaaagtgctgagattgccggtgtgagccactgtgtctggacttttttttcttcttttttttttttttgagacagagtctcagtctgtctcccagggtggagtgcagtggcgcaatcttggctcactgcaaccctcgcctcccacattcaagcgattcttctgcctcagcctcctgagtagctgggattacaggcgcgtgccaccacgtcaggctaatttttgtatttttaggagtttcactgtgttggtcaggctggtctcgaactcctgacctcgtgatttgcgccgcctcccccgccccccaaccttggcctcccaaagtgctgggattacaggcatgagccactgtgcccagcccatttttttcttttataccatctctctttttttttttttttttttgagatggagtctcgctttgtctcccaggctggagtgcggtggcacaatctcagctcactgcaacctccacctcctgggttcaagtgattctcctgcctcaccctcctgagtagctgggattacaggcacctgccaccatgcctggctaatttttgtatttttagtagagatggggtttcaccatgttggtcaggctggtagaaaccactcttaaagcccctacaaaaacaagccatagaccattgtttattccagaaaaacagcaatccaatataaatatcacctgagccatatatgtgattttaaatgttttcattcctggtttataaagataaaaaagataggtgaaattagccataggtggccaaagtgctgtaatctcagcactttgggaggacgaggcaggattgtttgagcccaggagttgcagaccaggctgggcaacattgtgagcccccgcctttaaggaaaaaaaaaagaaagaaagaaattagccataggaatgcattttatttaacctaacatattgaaagtattatttcggctacatgcggtggctcacacctgtaatcccagcagtttgggatgttgaggtgggaggatcacttgagcccggatgtcgaggctacagtgagctatgattgcaccactgcactccagcctgggcagcagagtgagcctctgtcatgtacgtgtgcacacacacacacacacacagagtttcagcttgtaattaataaaaactattaatgatgtttttgccaggcgtggtggatcatgcctgtaatctcagcactttgggagtccaaggtgggtggattgcttgaggtcaggagttcaagaccagcttgggcaacatggcaaaacgccccccctacaaaaaaataagaaaaattagccggatatagtggcatgtgcttgttgtcccagctacctgagaggctcaggtgggagaatcgcttcagcctgggaggtggaggttgcagtgagccgagatcgtagcactgcactccaatctgggtgacagagcgagaccctgtctcaaaaagaaaaaaaaaaaagaaaagctgttggccaagcgtggtggctcacgcctgtaatcgcagcactttgggaggctaaagcaggtgagtcacctgaggtccggagttcaagaccagcctggtcaacatagtgaaacaccatctctactagaaatataaaaattagccgggcgtgggggtgggcacctgtaatcccagctactcaggaggctgagacaggagaatcacttgaaccttggaggcggaggttgcagtgagccgaaatgacgccattgcactcaagcctgggcaacaagcgtgaaactgaggctcaaaaaaagtaaaagaaaaactgttaatgatgttttaatattattaaatggggtattactaaaatgaaaagttaagaggttttacattcttttttgcataccaagacttcaaaatcctgtgaatactttgtactcgttgaacacatccattggaccagccacatttgaagtgctctagccgacatgtcaccccagtcatggtggctcaaacctgcaatcccagcacttcgggaggctgaggccggcagatcacttgagcccaggagtttgagaccagcctgggcaacatagtgagaccctgtctctacacaaaattctttttttttaaaattttttattttttgagatggagtctcgctctgtcaccaggctggagtgcaatgacgcgatctctgctcactgcacctccacctcccgggttcaagcgattcttctccttagcctcccgagtagctgggactcctgcctcagcctcccgagtagcgcagactacaggcaagtgccaccacacccagctaatttctgtatttttagtagagacggggtttcaccatgttggccagggtggtctcgatctcttgacctcgtgatccgcccgacttagcctcccaaagtactgggattacaggtgtgagccaccgcgcccggcctctacacaaaattcaaaaaaacttaaccagacatggtggtgcccacctgtagtcccggctactggagaggctgacgtgggagaatcacctgagcccaggaagttgatgttgtagtgagccatgattacaccactgcactccagcctgggtgacagtgaatgtgaccctgtctcaaaaaaaaaaacaaaaaaaacaaatcaatctcaaaagctcaagaaccacttgtgggaacgagctgctgaattgacagggccaggctagcccattctccttcccccgtctgtcaactgggactgttgttggggttgtcataagggctgggcagcgtgtatactccaagcatgtaagagttcactgggtggagactgggcacagtggctcctgcctggaatcccagcactttgggaggctgaggtgggtgaatcgcttgcgctcaggagttcaacaccagcctagtcaacatggcgaaatcctgtctgtactaaaaatacaaaaaattagccaggtgtggtggcacatgcctatattcccagctaccctagaggctgatcaccggagtttgagaggtcaaggctgcagtgagccaagattgctcgattgcactcccacctgggcaaccggagtgagaccgtctcaaaaaagaaaaagttgtctgggcatggtggttcgcatctgtaatcccagcactttcggaggtcaaggtgggtggatcacttgaagtcaggaggttaagatcagcctggacaacatggtgcaatcccgtctctactaagaatacaaaaattagccggacatggtggcgggtccctgtaatcccagctactcaggaggctgaggtaggagaatcacttgaattcaggaggcggaggtttcagtgagccgagatcatgctgctgcactccagcctgggccacagagtgagactgtctcaaaaaaaaaaaaaaaaaaaatttgttggatggagaagagtatggtgttggggttgtccaggcagaggaaacagctgtgcaaaggccctgtggtgagggaaagcacgctgtgtttgaggtgtacagggatgcaaggtgttgaatggctggacagtgaatgctgaggctgggctggtgggctgggcccagccatgttggacttgggtgcaggggtgagttccatgggtgctgatgaagacattaggctctgtgccgtttagagcccctggccagtagggaagtgactggggagttgttcaagcctggatagtactctgtccacagcctctgtcctgggacggactcccctgtcaatgggaccctgcagttttctttttctttcttttttttttttgagacgaagtctcgctcttgtcccccagactggagtgcgatggcgcgatctcggctcactgcaacttctgcctcccaggttcaagcgattctcctgcctcagcctcccgagtagctgggattacaggcgcctgccaccacacctggctaatttttgtatttttagtagagacaaggtttc[131 bp omitted]atcgagtctgagtgtctgtagctcagtggcttacatccgcactgcttacaccacatgtcttagcttgtcgcagttcagtttctcagaagaaaatctgattggttctgctcagcctatagggccaagatgaggtcagtggctgagtgcagtggcccacgcctgtaatcccaacacattgcggcctgaggtgggaggtttgcacgaacctgggagttgggcatgccatggtaaaaccctgttcctattttttttttttttgagatggagtctcgctctgttgcccaagctggagtgctgtggcgcgatctcagctcactacaagctccgcctctgggttcacgccattctcctgcctcagcctctcaagtagctaggaccacaggcgcccgccaccacgtccgtctaattttttgtgtatttttagtagagacggggtttcaccatgttagccaggatgatctcgatctcctgacctcgtgatccgcccgccttggcctcccaaagtgctgggattacagatgtgagccactgcgcccggccttttttttgttttgttttttgagacggagtttcactctgtctcccaggctggagtgcagtggcacaatcttggctcgctgcaacctctgcctcccaggttcaagtgattgtcccctcagcctcccgagtagctgggactacaggcatgcaccatcatgcccggctaatttttgtatttttgtagagacggggtttcaccatgttggccaagctggtcttgaactactgacctcaggtgatccatctgcctcggccttccaaagcgttgggattacaggcatgagccactgcgcctggccatgaaaccccattgccacaaaaaatacaaaaattatccaggagtggtggcgcatacctgtagtcccagctacttggtgggtaggtggctgaggcaggaggatcacttgagcctaggaggccataggtaagctatggtcatggttgtgccactgcactccagcctgggtaacggactgagagggtctcacaaaaacaaagaacaaaacaaaaaaggccaggcacagtggctcacgcttgtaatctcagcactttgggaggccgaggcaggtggatcacctgaggtcagcggtttgagaccagccttgccaacctggtaaaaccctgcctctactaaaactacaaaagattagctggccctagtggcaggtgcctgtaatcccagctacttgggaggctgaggcaggacaatcacttgaacccaggaggcagagatttcagtgagctgaaatcacgtcac[367 bp omitted]tcacccctgtaatcccagcactttgggaggcccaggcgggcggatcatgaggtcaagagatcgagaccatcctggccaacatggtgaaaccccgtctccactaaaaatacaaaaattagctgagcgtggtggcatgtgcctctagtcccagctattcgggaggctgaggcaggaaatcacttgaactcaggagatggagg[131 bp omitted]aaccattgagtaggaggctgtgggccaggccacttttctagtaatcggcagttggcatggtcagtgatatgagtgacatgatgagaggcaggatgggtggggcttggggattgactggccctgtttggggaacgggcaaggctgaagtcagggtgaggcctgatgactgggtgtggggtggggatgctgggaggaaaagtggtttgatggaaggtaccaagcccagtgagaatgtgctagccagagggtctgatcccagctacagtgtcaacagcttcctgagaggtcaccaacaccgggagtgggagggggcagaggtaggggtggtctccttgggctgacaagatgctccaatggcttcctcaagctgctgctttttctttttgagacagggtcttgctctgttgcccaggccagagtgcagtgctgtgatctcagctcactgcaacctccacctcccgggttcaagtgattctccttccttagcctcccaagtagctgggagtacaggcacgcactaccacacctggctaatttttgtattttagtagaggtggggtttcaccatgtaggctgggctggtctcaaactcccgacctcaagtgatcccacctcggcctcccaaaatgttgggattaaaggtgtgagccactgcactcagcctggccccccttttaaagacatgttccttccagggactctttttggcatccgtcacctattccaggaagcattcttggattcagtttaaatttgaggacaagcgcggtggctcatgcctataatcccagcactttgggaggccgaggcaggtggatcacctgaggtcaggagttcaagaccagcccggccaacatggcaaaaaccccttctctactaaaaatacaaaaattagcctggtatcgtaggtgcctataatcccagctactaaggaggctgaggcaggagagtcatttgaacccaggaggcgcaggttgcagtgagccgagattgcgcccctgcactctagcctggctgactgaggctccatctcaaaaaaaaaaaaaaaaaaaaaatctgaggcccctcctctaggcttctgtagtgtccagggaattggcattaggacatttatgacttgtactattatttcttgtgtccatatttcgcgcctctgctgcccttttagtcctcaaggtcacatgctcagtgtgactcacgtccatcagttgccatcgcccagctggggcacacacaaactgcagggtggtggtggttggtgttcaggtgtttgtggggcagggggagcagagatagggagccttcctgttgctctgtcttccctgctgtggacatgctggtgaaatggtctcaggtaacctcacctgcctgttcttggcacaggccacaaactcaccctgttttgtttatttgcttgtctgtctcattacctctgttattacctgagaaggctttttcagtgtcttagactcctcaggttgctataccagaataccatagactgggtggcttataagcaacagagatttggctgggcttggtggatcacgcctctaatcctagcactttgggaggccgagccgggtggatcacctgaggtcgggagttcaagaccagcccgaccaacatggagaaaccccgtctctactaaaaatacaaaattagtcgggtgtggtggcgcatgcctgtaattccagtgtctcaggaggctgaggcagaagaatcggcttgaacccgggaggcggaggtcgcagtgagctgagattgcgccactgcactccaacctgggcaacaagagcaaaactccgtctcaaaaaaagaaaaagtaaaaagagaattatgtggggggacagtcagaccacaacaggacgtcttgctcacaaccgtactctcctgtccagcacagtaaatagcaggcggtgttcaaagattgtcattactctgagtcacacaggaagttttgggctttcaccccgtaaagcaatagtgactcaaactctacagcctgagaacgagcagcccaatccagggtactgggtgggcaggaggcgacagggtcaagttcaagctgtacacagagctgaacacatcatgggggtagaagatatttgttgttgacgtgtctgccttttctctaaggggatggtgagggaagccagtgggccagggcgtaggggcagtaggtctaggaatgagggctgaccctgctggcctcaccacacccctcctcctcagctggcgttgcagacggggcgtgaacccccacccatctggcgagtccagaaggcccttctgcagaaattcactccggagatcaaggacggccagaggcagttttgtgccaccagtaatgtaagcctgcaaaggggaccaaggacttgggggccccggggcgtggtatctaggagctggggttccccttagtgtggctgtgactcactccacagtgtatctggaagggggccccctgctgccggcaggctccaagcagctgccatggtggcccagggcacgggggtgttggccatctggctgggcagtgtgaagaatttcctcatgtgcctctttctccccatagtatttggggtattttggggatgcaaaaaatcggtaccagcgcctctatgtaaagttcctggaaaatgtcaataagaaggactacgtgagggtctgtgctcggaaaccctggcatcggcccccagtgccagtcaggtaccaaccatgggggacacaggggcaggtagtatgtagcgccgacaggcatggggatgcggcatgcaagagagaaggctggagagtggggggtggggacagagagaggagacagagcccagagagagagggggacagagacccggagagaaatagggacagagacccagagaaggggggatagagacccagagacaggaggggaacagagacccagaggtggggggacagagacccagagatgggagaacagagaaccagacgcatgagggagacggagactcagaaggagacagagacccagagaaaaagagggacagagatgggggaggacaaagatccagagacagggagacagagacccagagacgggaggggacagagactcacagaaggctacagagacctggggtggacagagacccagaaagagggggatagagacccagagagggaggggaatagagacccagagagggagggggtcagagacccagagagggagggggtcagagacccagagagggagggggtcagagtcccagagagggagggggtcagagtcccagagagggagggggtcagagtcccagagagggaggggaacagagaccagagagaggaggggacagtatgagagaagctattcctgtgcctagggcactgagcagggaccctgaggagaatttggattattgggggctgctgactacagtcccttctctgttcccttctagacgctctgggcaggccaagaaccccgtatctgctgggggtagctctgcacctccccctaaggccccagcaccacctcccaagcctgagacccctgaaaagacgacatctgagaagcccccagagcagactcctgagacggccatgcctgagccccctgcccccgagaagccctccctcctgcggcctgttgagaaggaaaaggagaaggagaaggtgacacgtggagagcggccattgcggggtgagcgggccaccagcggacggcagacacggccagagcggagtctcgccacgggacaacctgccacatcccggctgcccaaagcccggcctaccaaggtgaaggctgaaccgccccctaagaagaggaagaaatggctgaaggaggcaggcggcaacgctacagcaggcgggggcccaccaggcagctcctcggactcggagtcctcccctggagcccccagcgaggacggtgaggccctaggcagcctcagggctgcaggggtgggtggggaagggacacaggtgagggctgtccagagggctccaggtagccttggcaggacagtaagaaccagtatgttacagataatggcagtagctcacagtcacggggcatctcactacacgacaggctgcctcctgagaagctgatggatgttaacttgtgtaattttcacccatcctagtaggtagatactgttatcctcatctacagatgaggaagctgaggctccaagagagggcagcacagtctgtgttgggtgcccagcagagttgcaactgagcccagggtgcctcggactctgttcttcagtgctgcgttctgcctcataataggcaagatttgagggctgaggaagatgtgggactaggcagctgtcctggaggctctgtgatggtggggtttcctgtgaggccctgggtgaccctgagaaagaggcataacctcttgtgccttagtgacctcacctgtaaaatgggttcataatagacgaagctcataggagagtgccaatctttagtagacactacctgtctactccatgtctgcccagcacactgccacatcctcagtgcttatgatgatgtctggttaggccgggcacagtggctcgcgcctgtaatcccaacactttgggaggccaaggtgggcggatcagctgaggtcaggagttcaagaccagcctgaccaacatggtgaaatcccggctttactaaaaaatacaaaaattagcccagcatggtggcgtgtgcctgtaatcccagctactcaacgaggctgaggcaggagaatcacttgaacccgggaggcagaggttacggtgagctgagatcaggccactgcactccagcctagatgacagaacaagactccgtctcaaaaaaaaaaaaaaaagtctggttagtgatgacaataacaacaacaaaaataaatatatattcacatatgtacagtaagggtaacagctgatttttgttgagtgtttactatgtaccagaaatcattttaaacatttgcacacaggcttacttgacctttacctaataaaccccgtgagatagcttggtagaattatcctcattttaaagatgggggctgggtgtggtggctcgcaccggtaatcccttcactttgggaggctgaggtggtagactcacttgagctcaagagttcgagatgagcctgggcaacatagtgagaccccgtctctacgaacaaatttttaaaaattagctgggcttggtggtgaatgcctgtagtcccagctactcaggaggctgaggcagaaggatcacttgagcccatgagttcaaggctatggtgaggtatgattacaccactgctttccagccagggtgacagaattagaccctgtctctaaggataacttcttaaataaataaaagatgaagaaactgaggcaccaagaggtgatggtacctggtcagggccacacagtacaggggtagctgttttaacagagattagaattagcgagtcaaatgaggaaggcggaattgtctttccatcaaagccctgatatagcagggagatgtatagaaaataaaagcggccgggcacagtggctgatgcccagcactttgagaggccgaagcgggcaaatcaccttaggtcaggagctcgagaccagcctggtcaacatggagaaaccccgtctctactaaaaataaaaaaattagccgggtgtggtggtgcatgcctataatcacagcgactcgggaggcggagccaggagaatcacttgaacctgggaggcagaggttgcagtgagctgagattgcgccattgcattccagcctgggcaacagagggaaactcggtctcaataaatgaatgaacgaacgaatgaatgaatggctctttttcagggttgtccagggtcccagtttccttctctcttgttgaccggctgtttgccttgttgctggggtcatgacccctttccagtgagcccaagccctgtttctgcccctggccaccccacagaccttccccaacacccccaaatcccatcaagctctgtgtcctggcttccccatcttagggaccggacctctggctacacagtcacctgaccagacttcccaggagccatcctcacctcttttccttttcttttcttttttttttgagacagagcctcactctgtcacccaggttgaagtgcaaagtggtgtaatttcagttcactgaaacctccacctcctgggttcaagtgatcctccttcttcagcctcccaagtagctgggactatagatgtgtgccaccatgcccggctaatttgtgtatttttagtagagatgaggtttcaccatgttggcccaggatggtctcgaactcctgacctcaggcgatcctctcgcctcagtctcacaaagtgctgggatcacaggcatgagccactgcacccggccttcctcttttctttttctacctgtcgcccccacagctgggcagctcccagccctgtccgcccccatcccctccaccctttcccaggcctgcccagctcagcctcgtcctctgcttccagccctgccccaccttcattcgttcctacctggtccatcagcctggacttcagcctcactcctccagtctgtcccctgcttggcttaggagggatctttctacgcttacactcaccccttccctgctctcagctctctcatggctccctagtacccaccagaaaaagcccttgccctttctgcctggtgttggaggcccagtgtggtctggcctgcactgacctgtgcaatgccagctcccatctcgtccctcagccttgcccctttatgatctgacctccctggataccctcttttggaaaccaacaatgctgctgctttagacttacgtgaagccacaattaagtgctctgagctatcactcaaggc[132 bp omitted]ctcaccgcaacctctgcctcccgggttcaagcgattctcctgcctcagcctcccgagtcgctgtgattacaggcacgcaccaccacacccggctaattttgtatttttagtagagacagggtttctccatgttggtcaggctggtctcgaactcccgacctcaggtgatccacttgccttggcctcccaaagtggtgggattacaggtgtgagccaccatgcccagccctttttttttttttttttttttttgagacggagtttcgctcttgttgtccaggctggggtacaattgtgcgatctcggctcaccgcaacctccgcctcccaggttcaagggattctcctgcctcagcctcccgagtggctgggattacaggcatgcaccaccatgcccggctaattttgtatttcttagtagagacggggtttctccatgttggtcaggctggtctccaattcccgacctcaggtgatctgcctgcctcggcctcccaaagtgctgggattgcaggccacagcactttatgggctacaatgcctggctttttttttttttttttttttttttggagacgagtttcactctgtcacccaggctgtgcaatggcacaatcttggctcactgcaacctccgcctcctgggttcaagccgtcctacctcagccttccgagtagctgggattacaggcgtgtgccaccacgcctggataatttttgtatttttagtagagacagggttttgccacgctggccaggctggtatcaaactcctgaccttaggtgatctgcctcggcctcccaaagtgctgggatgacaggcgtgagccactgtgcctggccttctctgagcttcttgcagtccctgtgattctgccacaagagcacgtggcactggcgcttgcctgtcaatcttccctagcggacttggacctcccaaaagcagggatttctcttccggtccccagtgttgagaacagtgtctgccacacaggtggtctcagaggaaattgggataacgagcctgcgtcctgtcttttctgcagagcgggcagtacctgggcgtctgctcaaaaccagggcgatgcgggagatgtaccggagctacgtggagatgttggtgagcacagcacttgacccagacatgatccaggccctggaggacacgcatggtgagctgaggcctggggaggaggggggggggctgactcggtctgagggagcaggtgctgagggcttggacgtgatgtgagagaggagaggtttggggtcgggactcctgagtctgagggaagaggagctgaggcctggacctgggtctgagagaggaggggctggggcctggagtcctgggtctgagggaggaggtccctgggtcctagggagaagaggctgggggcctggactcctgggtctgagggagaagaggctgggggcctggactcctgggtctgagggaggaagggctgggggcctggactcctgggtctgagggaggaggggctgggggcctggactcctgggtttgagggaggaggcgctgggggcctagactcctggttctgagggaggagaggctggacctggactcccaggtctgaggaaggagggactggactcccgggtctgaggaaggagggactggggcctggactcctgggtctgagggaggagggactggggcctggactcctgggtctgagggaggaggggctggggtctggactcctgggtctgagggaggaggggctggggcctggactcctgggtctgagggaggagggactggggcctggactcctgggtctgagggaggaggggctgggggtcgagggcctgggggtctggactcctgggtctgagggaggaggggctggggcctggactcctgggtctgagggaggaggggctgggggtctggactcttgggtcagagagaggaggggctgggggtctggactcctgggtctgagggaggagcggctgggggtctggactcctgggtctgagggaggagcggctgggggtctggactcctgggtctgagggaggagggagctggggcctggactcctgggtccgaaggaggagggggctggggcctgtacttttgtctctgagtgggaaggggatttggggacccagactccatgaccccaccttggccccagtgctttgtgaggctgtggccttcctgataccatgtcctcgtccatcagacgagctgtacctgccccccatgcggaagatagacggcctgctgaatgagcacaagaagaaagtcctgaagcggctgtcgctaagcccagccctgcaggtgcctgggggtctgggcagggggtgtctggggcccagggtccacatggagaagacatgtacgtgtcggccgctgttggcgggggtgatccttggaaggagatcgtccttctgggctcagatgggagaaaagttgagggcaggactgtcaggagatctctgggttctcaacagccatgaagcccatgtggggaggagctgtgggccttggggcagcagaggggtggttgtgaaaggctgggctgttgtttcggagaacaagtgtgcagccaaacatagactaggcctgcacccaaagcgggcactggaccgatggcttctttgtgagtccaatgcaggctattaggatcccaggcttcagtgttaagtcatctgtatgatttcccttctgggatattctgggatggaatatcagggctctgaaatccagtgttaaactggctctgaggattctggttgggatgttagtgtggcactgagaattccgggatagaatgttagggtaactgagacttctggaatcgaatgttattctggctttgagaattctggaagacttgcagtgattctgagaattctgggatggattctaggctggtactaagaattctgggataggctattaggctggtgctgagatggctggtgggaagttagtcttagaaaatacgcaggaaggccgggcacagtggctcacgcctgtgatcctagcactttgggaagccaaggccggtagatggcctgaggtcaagagttcgagaccaccctggctctctcaaaataaaaaaaagtgaaaccccgtctctactcaaaataaaaaattagctgggcgtggtggtgggcacctgtagtcttagcttccctggaggctgaggcaggagaatcagttgaacccaggaggtggagcttgcagtgagccaagatggtaccactgcactccagcctgggcgacagagcaagactgtctccaaaaaagaaaaaaaaaacaggccag[134 bp omitted]ggcgtggtggcgggcgcctgtagtcccagctactcaggaggctgaggca[153 bp omitted]gagagaaagagagagagagagagatattaatatgactgagaattttgagtgagatagtagttttctcagaatgatgggtgggacgttgggatgaccgagaattctggaatggattcttagactggtgtggagaaatctaagctggaatgttatgctgactctgaaaattcgtgggtagagtgctgggtgggttggaaaattctgggtagcattaggttataaaaactctggaggatatgaatctagtctacaaattctgagatggattgttaggctggcactgaggattgtgggtgagatgttacactagggtagataatcccagtgtaggatattagagtaggtctgagaagtatgtgttattagtcgggagttagaattctgggatagatggctgggcgcggaggctcatgttggtaatcccagcactctaggaggctaagggaggtggatcacgaggtcaggagaccaataacaacccatcctggctaacatggtgaaaccccgtctctactaaaaatacacaaaaaattagccgggtgtggtggtgggtgcctgtagtcccagctactcgcgaggctga[140 bp omitted]gatagggctgagaattctgggatagatggttaggatggggccaataattctgggatagatggttaggatggggccgagaattctggggtaggtggttaggatggggccgagaattctggggtagatggttaggatggggctgggaattctgggatagctggttaggatggggctgggaattctggggtaggtggttaggatggggctgggaattctgggatagctggttaggatggggctgggaattctggggtaggtggttaggatggggctgggaattctggggtgggtggttaggatggggccaggaattctggggtgggtggttaggatgagaccgagaattctggggtaggtggttaggatgggactgagaattctgaggtaggtggttaggatggggccaagaattctggggtaggtggttaggatgggaccgagaattctggggtaggtggttaggatgggaccgagaattctggggtaggtggttacgatggggctgagaattctgggataggataggtggttaggatgagactgagaattctggggtaggtggttaggatggggccgagcattcagggataggtggttaggatggggctgagaattctggggtaggtggttaggatggtgctgagaattctggggtaggtggttaggatggtgctgagaattctgggataggtggttaggatggggctgagaattctgggatagatagttaggatggggctgagaattctggggtaggtggttaggatggtgctgaaaattttggggtaggtggttaggatggggctgggaattctggggtaggtggttaggatggggctgagaattctgggatagatggttaggatggggctgggaattctgggatagatggttaggatggggctgggaattctggggtagatggttaggatggggctgggaattctggggtagaattttgggtgacattgagaatctgagccaggccagaaggcacagtggaagcatcactggtcaggcccagcctcctctgtcctttgaggagactctagttgtctctcctgatctgcagcctgggggaaactgaggcacagatctgagacctggctgttgggtttggggtttatggatccagggcagcatccagctgacccattggcttcccgcaggatgctctgcacacgttcccacagctgcaagtggagcagagtggggagggctctccggaagagggggctgtgcggctgcggcctgctggggaaccctacaaccgcaagacgctcagcaagctcaagaggagcgtggtcagagcccaggtgggcactggggctggggctgggagtggggagtgctggcggtatgtgggaagggaggagaggggctgccaagtgccgggctggaggggctgaggcatctccactcctacccaggagttcaaggttgagctggaaaagtcgggatactatacactctaccattcgctccaccactataaataccacaccttcctgcgctgccgggaccaggtgagccccacccacagcacccatcgccctgggattccaacctttctgacttcctcttgggatctgagggtccaagcccagccccatcctgcctcagacccaagagttcaggtccttctgtcttggacttaagaatgcagcccccagccctggtctccctgggacactgacatctgacaccccaggccccatgccccagccccttccctccccagaggccggtgtgccaccctccccagtgccatgtttgacccctgcagaccctggccatcgagggcggcgccgaggacctgggccaggaggaggtggtccagcagtgcatgcggaaccagccgtggctggaacagctctttgactccttcagtgacctgctggcccaagcacaggcccacagccgctgcgggtgaccccgccccagcttgtgaggggggcgcctcctccatgaaccgagaattgggacagaaccgtgtcctcaggagctaacacctgggctccatcgccggggaaagggggtcatgggtcagggtgtgtctgtgctgccccctccagggcagggttcaaagtccgactccccccctctcccaagccccctccactccctccccattcctcccactgttcggtgtacagagaaattatttatatatatgtataaatgtctatttagtaacggtttccctctccccttgccccgaccccccctccacagccacagcccccgccccctccaccttgtacataatgtataggaaaagtctatgtatggctggggggggtggggtggcttcagagagctgggggaccccttccccccaagtcccccctgcaggccaagatctttgctaaaggccattccctccgcagggcatttggcgtcgggtgggaggggaaaacgcatcttgttaattatttttaatcttatttattgtacatacctggggcaggggcttggggaggtggaggggggagaagggtcccctctctctgcccctcccactccttttctacggcgatttgtctgtgtctggcccccacccactgcccatcccccattgttgtctggatgtggttctattttttatcggtctcctttcccctcctccccgttctcgcccccgccccaccccctgctcccactaccctttgtctcttgctctttcttgggcttctgtacaactcaacttgtatacactgtgtacacacaaccagccaaacgaaaacccaacggcaaacactttaccggcaggctggagtgcctctgtcctgcggcgctggagtgggtggcagtggtagcaggggcagaggttctggaacgggactttcccagagccctgggcagtggggggcctgaggctggcatatgttctgtgtccccgcacagcagagtatcccaccctgaaatttaatgacttcagacaacaaatatttatcactggggggtttcttttgttttttagctaaagacagggtctcgctctgtcacctaggctggagtgcagtggcatgatcatagctcactgcagcctccaactccctggctcaagcgatcctcctgcctcagcctcccaaagtgacgggattacaggcaagtgccactgtgcctggccctgtgttctttatgttacccaggctggccttgaacttctgggcttaaaagatcctcctgccccagtctcaagtagttggcatta[132 bp omitted]ccccggttcaagcgattctcctgcctcagcctcccaagtagctgggattacaggggcctaccactacatccagcaaatttttgtatttttagtagaaaccaggtttcaccatgtcggccaggctggtctcgaactcctgacctcaagtgatccgccagcctcagccttccaaagagattacaggtgtgagccactgcgcccggcctcaagtcctgtattcttgaatccaagtgagtggtccatggtacagcactcttggagttccccaagcacttgtataaatgtagaatcggcacaggcagcagacgaggagagggcaggttgaatagggctgtttctcctcctcccacccttaaaggaaaagatgtagaatctcaggctgttgctctggtctacttgatcagaacccactttttagtaaaatgccgagaggattctcaagcacattcaagtttgaagaaccgtgttctagaacaagaatgttaaaaatgtgcaggttggctgggcacggtggctcacggctataatcccagcactgtgggaggccg[134 bp omitted]gaggctgaggcaggagaatcgcttgaatccagggggcggaggttgcagtgagttgagatcgtgccattgcaccactccagcctggctgacagagcgagactccatctcaaaaaataaaaaatgtggaggtcaactggcaatattttagaacccagtctatgaagcagtgaacaggctgttgtcattctagagcctggatggatggaccactggtgttccagaaccctggcttagtccgtgggtagggacccagtgtgagatttgagggtggaacatcagcattccagatgcccttttaggtgagattcagggagaaccctcatcgttctagaaccttgagtattgttccaggggtgtccaaggagagaatacagtcatgggttcttagtttctgttgtaccagtaaagccccttcctcatccctcttttttgtttattactagagacagaaactaaaaaccatggcttcaggctgctaaaagcctaaaacaaaacagaacaacaacaaaataaggtgggttggacaaatctggactctagaccatcacatgttacagatttttttttttttttttttttttttgacggaatctcgatctgttgcccaggctggagtgcagtggcgcaatctcggctcactgcaagctccgcgtccagggttcctgccattctcctgcctcagcctcccaagtagctgggactacaggcgcccaccaccatgcccgactaatttttttttttttgtatttttagtagagatggggtt[133 bp omitted]gactagaggatggatagtagcatttgagaaccataatgggtgagtcaacaatagaccatgaagccaggcgtggtggctcacggttgtaatcccagcactttgggaggtggagatgagcggatcacctgaggtcaggagtttgagaccggcctggccagcatggtaaaaaccttcttttttttttttttgagacggagtctccctctgtttcccaggctggagtgcagtggcactatcttgactcactgcaacctccgcctcccaagttcaagcgattgtcctgcctctgccttgtgagtagctgggataacaggtgcatgccaccactcccggctaatttttgtatttttagtagagacagggtttcaccatgttgatcaggctggtctcgaactcctgacctcatgatctgcccttcttggcctcccaaagtgctgggattacaggcatgagccactgtgcccagccaaccctatctctcttaaaattacagaaattagccaggcatagtggcttgtgcctg[142 bp omitted]ctagaatcattgagttaagagggctgagtacaaaccattattgtgcttgaactgtggcctatagcatgtgggggtgcagcctttgatggaaagccatacattcaaggtcctggactagactgtcaaactgaggccaaatgccaggtgacagtggctcatgcctataatcccagcactctgggaggccaaggcaggaggattgcttgagtccagcctgggcaacatggcgagatcctcatgtctccagaaaaaaaaaaaagctaaaattgaggccaaaggattggcattgtcccaggtcagagttccaggatggaaaacgggtggagtattctttttcttttttctttttgagacagagtctcgctttgttacccaagcttgggtgcagtggcatgatcttggctcactgcaacctccgcctcctgggttcaagccattcttctgcctcaagcttcctgagtaactgggactacaggcacgtgccaccaggtccaattaatttttgtgtttttagtagtgacgggatttcaccatgttggccaggatggtctctaactcctgatctcaggtactccacccgccctggcctcccaaagtgctgggattgattagaggtatgagccaccgcgctcggccgggagtggagtgttgtgagcgtggacagtgaggtcaggaatcatccctttagggacagaatcaccttgtggttggcctttggcatccagctgcccagattagaatcccagctgcagcactaaccaggcagattgggtaacagaccccatcttcacctttgccatccattaaatgggcttttgtcaaaatgaaggaagacaaccggtttggagcacctggcctgcagctcctgtgacctgtagcaggagatctagagaagcttaacagaggtccacaacatgacagaaaacaaagagacacagagaaagataaagatggggacattggccgggcgtggtggctcacacctgtaatcccagcactttgggaggccaacgtggatggatcacctgaggtcaggatttcgagaccagcctggccagcatggtgaaaccctgcctctactaaaaatacaaaaatttgtcgggtatggccgggcacagtggcttatgcctgtaatcccagcaaattgggaggccaaggtgggacgatcatctgaggtcggaagttcaagaccagcctgaccaacatggagaaaccccgtctctactgaaaatacaaaatcagccggggtggtgcgcatgcctgtaatcccagctactcaggaggctgaggcaggagaatcgcttgaacccgggaggcggaggttgcggtgagccgagatcgcgccattgcactgcagcctgggcaacaagagtgaaacactgtctcaaaaaaaaaaaaaaaaaaaaatttagtcgggcatgcttgccggtgcctgtcatcccagctacttgggaggctgaggcagaagaattgcttgagtctgggagatggaagttgcagtgagccaagatcacgccactgcactccagcctgagcggcagagtgagactccgtcttgaaaaaaaaaaaaaaagatggggacatcaaaacctggaaagctttagaatcgttgctagggcctgccagagctcaggggaggggaggaaccgaatacataatttctggcactaacagtacctagggagatgccagcctttttgctgttgtgtgttgatctttgggacactggtggctgtaaaccttccaaaaatggtctgccagttgtcttgagcatttggggggcaagcggtaactttaatcaccttctcaaagtgcatcttggtcctactagaagcagggtgccccagccaagaagttggccccatcgggcagtgcaggaaagactctgatcctctgcagggggcatgtggatggtgagatctgggaagagagatgttggcacaggactccttcctgttgggggctcagtacccgcagctggggcttaggtggaagtgtcagagcttgtttggaaactgatcaaaacattgcccaccctcttgccccaccactccccatccagcaggggtggacccctggtgtgcagagttcctagcagggaagagagccaacatgtgacagtacatccgagctgtactttttcccagggcagaaggttgagaacagg[135 bp omitted]gcaacctctgcctcccgagttcaagcgattctcatgcctcaccctcccaagtagctgggattacaggcgcccgccaccacacccggctaatttttgtagttttagtagagaggggggtttcaccatgttggc[131 bp omitted]catggttctggggcagaatggagacatgtcagccacagtcattgatggtgagcacttagtatgcgccgggctcattcctcctctgcaatcgtctcctttagtctcgtgctcaccctgtgaagtagctttgtacttacccccattttacagatgagactgaggtggcagagctggatttgaattcaggcatcccggtcacgcaaaggccatgctccaccctaggactaggaagcaggttccagggtgggtgcgagtagagcattcagggatcaggggcctgggtatagggagcagatgtttgactgctgataggtttcaggtggagcctcaagttcagggcatcgggacatctcggttgaggtgttttgttttgtttttgttttttttgagatggactctcgctctgtcgtccaggctagagtgcagtggcgcaatctcggctcactgcaactccacctcctgggttcacaccattcttctgcctc[133 bp omitted]cagcctcccaaagtgctgggattacaagcatgagccaccgcgcccggccggttgaggtttttagcctggtgtgttgggtagatttggggctttaaagatggccggtcacacaggcttgggaggtgggtggacagtggtctccagttggcttcagccttccagggtagcaaatagtgggcaggactgctcctcccccaaccagagcttaggttggatgtgggagagtcctaagtgtccccaggctgggcatggtggatcatgcctgtaaatcccagagctttgggaggccgaggcaggaggattgcttaaagggaggagttcaagaccagcctgggccacatagcgagaccccatctctacaacaaaatgaaaaattagccaagtgtgcactcgtagtcccagctacttgggaggctgaggcaggaggattgcttgagcccaggaggttgaggctacagagttgtgatcacgcgactgcactccagcctgggcaacacagtgacaccctgtctcaaataaataaataaaatgtaaaaaacgaagtgttcctaggacacagatgggctttgggtatccagactgaagtgtgtcatccatttacccactgtggccttaagacacccaacacttctgcttctcccaggacagaatagggggttggatgggggatgtccacactgaccccaaattggattaagtgtttagattcagatttcagtgctactgggaactttctgaaaatgaggacttgccagacggctgcttggacaccattccacccacctgtcccttctcgatatacattgaaggtgagagtgggacaggcagggtttgtagcagttgctccctgtctctatttttgtagacagagtctagctcttgcccaggctggtctcaaactcctggcctcaagtgatccacccatttcggtctcccaaagtactgggcttacaagcgtgagctaccacacccagctgagttgctgcctgtctccaatgtcctagaacgttctattggaatgttctagaaagcactatccaatagcccactcagcaatgataggaatgttgtctatctgccctatctattaagatagccactagaggctgggtgcggtggctcacgcctgtaatcccagccctttgggaggccgaggtgggcagatcacttgaggccaggagttccagaccagtctggccaacgtggcgaaaccccgtctctaccaaaaatacaaaaattagccgggcatggtggcatgcgcctgtagtcccaggtactcaggaggttgaggcaggagaatcacttgagcccaggaaacagaggttgcagcaactggagatcctgccactgcactccagcctgggtgacagagcgagactcttgtctaaaaaaaaaaaaagtcactagccacatgtgacaactgaggtcttgaaatgttgatttgactgaggaactaagttttattaaaatattttttattttgttgttgttgttgtatttgagacggagtctcgctctgttgcacaggctagagtgcaatggcacaatctcggctctctgcaaactccacctcccgggttcaagctattctcatgtctcagcctcctgagaagctgggattacaggcgcccaccaatgcgcccggctaattttcgtatttttaatagagacagggtttcaccat[136 bp omitted]ttgagacagtcttgctgtcgcccaggctggagtacagtggcatcaccttggctcactgcaatttctgtctcccaggctcaagcgatcctcctacctcagcctcctgagtagctgggactacaggcatgtgccaccacacccagctaatttttgtatttttggtagagatgggggcgggggggggtctcactttattgcccaggctggtctcgaactcctgagattaagcgatctgcccacctcagcctcccaaaatgctgggattacaggcataacccactgcatccagccaaattttatttaattttaatttaaatagccacatgtagcttctgcctaccatattgaagagcgcattctataactttctaggaaaaaaaattccttcatcagatgttcaaagtttatcccaagaaaatacccataaggtcaagagattgagaccatcctggctaacatggtaaaaccccgcctctactaaaaatacaaaaaataaattagctgggggcgtggtggcatgcgcctgtagtcccagctactcgggaggctgaggcaggagaatggcatgaacccaagaggcggaggttgcagtgagctgagatcacaccactgcactctagcctggctacagagtgagactccatctcagaaaaacacacacacacacacacacacaaacagaaaagggtagaatcgccctgttgaagggaaagtggggggtctaggcacttggttatgctttataaacttcttctgctcctccccaagcaataggttctagatgcgagggttctaggtggagggaggccttagaacatgtgtgccctgaattcgttcaccttcccagagttcattcccccaccctttttttttaagagatgggggtctcgctatgctgcccaggctggtcaaaaactcctggactcaagcggtcctcccgcattggcctcccaaaatgctgcgattacaggagtgagccacagtgcccgaccctcattacctttttagaaagcacctcctgacgttggcagtgacatttatttttctgggggaggggagttatatacagcagtgacccggagcccctcacccccaccaggcttaggtggggacaggaggcgttggcagaaggcacacagtggcagtagcccagaagaggccaggaagtaagggtgggtatgtgatgtgtcctgggagacccagatgaggaaattgaggctcagtgagggcctcaggtcacacagcaaggtgcgaaggcagctagtcccgagagcttgtggtggttgcttctctcttgcctgggctacaggaggacgcaggggcagcccccgcccttcttcctgggggcactgggagggctcggtgggagctcttgttcctggtatttcctgtgggaaaacgccagtgagtttggagtggaagggctggggacaaggacgacaggaaggggacttggctcaccggacagcccgcaccagctgctcaaaagcctcgtccacgttgagacgcagtttggccgaggcctcaaagtaggccacgtggtgggaggcgccgaaggcagaggcttctgatcgggggacctgggggtaggggggacacgggggagtcaggtccctgcactcagggtgaccgcagccagagagacagacaggcaggctggatactctaggagaggtgacccactgtgagaactcaaagaggaagagctcctgagagattatggagggagatgccgcaggggcttggtgtcttctaagtaagggatgggggcaggcttcgtgggcacttgccctgctatgccttagataaccaggagtgggcaggcagggaagtcagggtgttcccggcagaggcaggcggaaccccaaagcctggaaatccccagagcctttgccagatggatgagttctgtgtggaaatcgttgtgggggaagtgatgggagcagggaaaggaggggcgcaactgtgcggggcatctggcacctggggaggaactggggagccatggagggggccggccatgagcaggggaggtgctggggctggtgggaggttggctggaagggaggaatgcgaggaaggggcaaagagagctggcggacggggggtgaatgtcctttgttccgtccagcagcctctcctgaggacacttgcatgctaggccctctgctcggtgatgccggggaccctgaaggtccagtttgggggtaacccatctaggtgagctgtgtgacagtggcagtcgcagcactgcaggaacagaggaggatgctgatgggggacaggtgtgctggaaggagcctcccagactgagatggggtccccagaaagaggggtgtcccgaacctggcgctgtgactccagatctgccttgttcccgaccaacacaacggggaagtcgtcgcggtccttgacccgcagaatctgcgtgaagagcttgcccacctcgttgaaactgcgagtgaagccggaggcatgaggtccagccagctgcagagcccaggtcctccccacacccacccactgctccgccaccagcaacccctgtcacctctgccggtcgttaatggcgaacaccagcaggaagccgtggccagcacgcatgtactgctctctcatggccccgaactcttcctggcccgcggtgtccaggactgcagagacagggagaggggccatcgtggggaccaggctccccgcagtcacccccaagagccctcagcccccactgacaccacccccatccatcatccatccttgccgccctcactgtccagccgggctgggatgccatccacactgcagatcttcgtgtaggagtcctcaatagtggggtcgtagtcagacacgaagtaggactggcggggtggggagaggatagttactgcagtgccccggcagacaggacgaagccctgcccttgggatgcctctctcagtctctgtccctctctctctaaatgtctgtccctgttgctgggtctctgcccccttttctctgggtctctgtcccgtctgtctctctgagtcttttttttttttttttttttttgagacggagtttcgctcttgttgcacaggctggagtgcaatggcgagatctcggctcactgcaacctccgcctcctgggttcaagagattctcctgcctcagcctcccaagtagctgggattacaggcatgcgccaccacacctggctaattttgtatttttagtagagatgtgttggtcaggctgtgttggtcaggctggtctcgaactcctgacctcaggtgatccgcccgcctgggtctcccaaagtgctgggattacagatgtgagccactgcgccctgccctgtccttctctctctctccagatgtctgtccttgttgctgggtctctgcccccttttctctgggtctctgtcccctctgtctctctgagtctctattactctctctctctgggtctctgtccccttctctttgggtagctgctcccctgcccccctttccctgccccccacccctcctaccagtcttcttctctctgagtcactcctggtcctctctttctggtataaggtacatgtcccacatcgtgattacatcctagctgtgtgacactgaacaaatcacttcccctctctgagcctcagtttcctcatttgaaaaaggaggctaagaacagcactacactccatccagcactggcaagattcggagcaaaaccccattaaatattgaatgtatcagttatcggaggcgttgttgtccagactgcctgtttatatctctccctcctcttctgcttcctccctctcttcctcctcccccgtctcctcctcccccgtctccttctcctgctcaggcggcctccagcgtctcctcccaggggaaggtcccggttccaatccggctgcggagaggctgccccaccctcgggccccagcccctcccttcctgcctgggtcctgcccgctgccagccaagcctttggccagctctgggactgcctctgggtgcaaggggcccagggctggggcctttctctacacaagcagggcttcctcccaggcccttgaaggggtctcttggtgggggtgaggggggtgtcctggggccccggggcctctgcggtagcatgtcaggccaagacacttttctaggatttctttgaagctgggaggacctccctcaggaatggggaggaggtttcctgggctggggtggaatttcaggaaagggggtgatgtggaggctaggggtctgaaggctgcatctgtcggttagaggggtgcttggtgaggggcttgtcctggagggaggctgtaaggatcaagccctgggagggattgtggctctgggggtagttaggggcgtgacctcagagcacagcgtgagaagctcagggctgagaactgggagccagcccggaggtggctcaggggttttgggaggttatagtatatacagtcttagaaacattgagttcatttatggggtcagagaaactcccaaggaatagatctttctgggggtgccaagaatctgggggcttcttccatggagatgatttgagagctattcagggtttctgagaggggctcagggagttgcagcggagaaagcatgggatggaggaggggctggttttccttgggggtggggtgggagagtggaggtttgggcctccgggaatgggggattgtcaggacttggggtcttggagatttctggaatggccaaggggcaggatgtctttttaaatctcgggtcggagagcaggactctcttaggactgggtagtcccagaagagtctcagggccagggtctgggtagaatttctagattctgggggcagtcatggaaggggctaagaatcaaacgtggggccgggcacggtggctcatgcctgtaatcccagcactttgggagtccaaggcaggccgatcacgaggtcaggagttcgagaccagtccaatatggtgaaaccccgtctctactaaaaaatacaaaaattagccaggcatggtggcactcgcctgtagtctcagctacttgggaggctgaggcaggagaattgcttgaatccaggaggcagaggttgcagtgagccaacatcgcaccactgcactccaccgcactccagcctgggtgacagagtgagtgagactctgtctcaaaaaaaaaaaaaaagaaaaaaaagaatcgaacgtggtggaatctcaaaggtgctgggcactggcattctcccaggaaggctctcaatggcttagaggggaagttggggactgggatttgggggagatagggctcagggtggtggaaggtggcaccaagggcgtggtgggggtcctgggagtgcttagggtccgaatggggtgagtattttgtatttagcatgctcccaggaggtgctcaaagccaggtcagcaggtaagcggggtcttaggcactgggagagggaatagtgggtctcgggatgcgagtgcagaaggaagggtcccccgtgcaggggatggaggctctccaagagtttaggttacaatctgtggggatcttttaagattagagggccttataggagggtctcagtgatgggtcaagggggaaaaggggtctcggggatccccccaagggctcagttctgggtcccgggggacaccctcccgggtgagggcccactacctggatgaactggatggtcagcgcgctcttgcccacgccgccgccgcccacgaccaccagcttgtgtgtctcgctgggcggggggtccccgggcccaggtcccccgccccggggccgcccccgccctgtcccggacgccgccccgctgctcatgtcgccaccgctgctgctgccttcgctaccgcctgcgggggagccgggcgggacccgggggggcgggctacgctaatgaggctactgcataatcatgagctctggcaaggagggctcgcgtctccggacacttaaggagggggacgggccaaagaaagggaggagctatgttaataagggaaagggaacggcgttcgctgcgaaggggaattccgaatgaggcggggctatgctaatgagagacctgtgctttgccctgagcggcgccacgcgctctcagcgggagggcggtctgtgggcgtggctatgctaataagaatttattctttcagcagacggggcggaaagttcctcaggggaggggctatgcaaataaggacccctgtgacactgctgcttggggcatcgtctccgaggccttagtatggtaggcggagctcgtcgactcgcgcgcgcggccgtatatagggcgctccgaggaagcagcaggttttgaggagtagctccacctccctcctgggatcctagccaagctttcgaccccggcgtctgggttagaagctagagtctccgcccgctaagggacccaggcttccggttcccgctgtcccagccaagcggaagacagactgggaggagagtggggccctagagggggacagcagggtaacggggcagggaggggccgtgagatcactgcattcctaatccatgagccagctcgcccaagtagggatgcctgggtcatgaagagcctggggccaggatttctgggtcttgaaggagaaggaagcagagggcccagactcctgggtccttaggagaaaatggggctggagatgtggactcctgggtcctggggaggagggtgtcagggaggaaggtagacaggttccttcgtactaggttcggtaaaggagggagccgggggcctggactcttaggtccaggaattggagaggctggggacccaggattctggatccgagcgagggcactggcttggggggacccgaattcgtatgtgagagcttgagaccaggactagtctgggagaccgactcttggatccgaggaaggaagaatcagactcctgagtcggagggaggagggaaataggagtctggacactgctctgagtgagaggattcggaattcagacttctctgtactgaacgaggcggctatggggtcgggcttctaggttctaagtttatttttatttgtttatttttgagacggagtttccgtcttgtagcccatgctggagtgcaatggcgcgatcttggcccactgcaacctccgcttcccgggttcaagcgattctcctacctcagcctcccgagtagctgggattacaggcgttagccaccacgccaggctaatttttgtatttttagtagagactgggtttcaccatgttggtcaggctggtcttgaactcctgatatcagatgatccgcctgcttcggcctcccaaagtgctgggattacagacgtgagccaccgcgcctggcctatttttatttttttagaggcggggtctccctatattgcctaggctggcttctaacttctaggctcaagccatccttccgcctcagtctcccgagtgggactacggtgtgcgccactgcatcccgtctggttctaaatttaggggggcctagaggatctggattctgagagccccagaatgtgggcagcacaacatccagcaagtcgtgctcactccgccggactacaattcccttgcgtctgttctgcctggcgcctcttacgtcacctcctgttccgccaccctttccgcgcgcgcgcagggcactgtggggcgtcatcgcgggctaccgcggccccgcccacttcacctctcaccccattagctgtccccgcgcgacagaggcggtgcgcggactacgcctcccggcgtgcatcgcgcggaccccgccccatgtgtcccattggcttctgggaaaccgagtgcggttgccttcccgccggccttcacgtcgccgtgctcggtacttgaaatcccggcaagctcggcggcgctttagctccgcctctctcctcctttgctcacgaaccccgccccagcccgccccgccccgcgccggggccggagccgcagcccgagcggcggggtaagatggcggcggcagtccgggccgcggggctcgggcctattggggtgggcggggcggagttgggtcgctagttgtcccggggtcctccccacaagccacgggtcctagagggcttctcggggcggtctcgggcccggcagctgcggcgaaacctggcgccgagaggggggccttctcagggccccgggacgcatccgtgggttcctgggggcgtctatggggcgtctccgagaggacttggggcgtctctgggcctagaccgagcctaaggcctgccctccatcacacagctggcctggatcgtgtctgtagacactgtagattgtctttttgggctgaccggaggctagggtctggttagagggttctggggccatcttgagatcttgagatatgtcccaggggtgaaggagggtctgcaagacctgaagagtatcttcagagccatctagaggcctggggtatgtcttttagggctggaaagtgtctgcatgggctggcctgaggatgcaactggtctgcataagtctggggccatttatcaggcctagaaggagtgttcaagggctaagaagtcatttagggccccctagggggttgggttatgcccaccagggaagggcgccaaatattgagatgtactgagggtctggggtctccaaggtatgggtagtgtctaataatgggtgacaggaggctgggggcagttagaaggacctggaaccatctagatggctttaatgtgactgcaggaatgcagttttgatgcctggagcaaattcgaatgcctttggggtcagagcagcttgtggcgaataataatacggaaagagaatgaggaaattttgcccagcttagatatacttgcccttcagacagtaattcaaatgaaaaatgttttaagattctgcattaccctgggggttattgagagagttagaattaatctacattagtctggaagagtctggagggtcatctagacccactattacagtgcttttcaaggggaaacctgggccatgttgaccgtgatctgcattaagatacattttttcattgagacctggtacagacagtcataatgtatttaacattatataacataatgtattaacattaactcaccttccacgaattgacatttccacttactacttgtgctgtgctgtgaagaactattttgttctatttactttttaaaacaagctatttgtgaagcactaaactggtatatgaccctgttgttggggaaaccactgatccagataggacctagcagtatctgcagagcattcttctgttcagaagatctcagtagctgagggtgtgtctgcgaagcctggtgctttctaaatgagcaagcaagcatctttgtatactgcagagggtttggggatccctcagcctgtagtcagcagatgttgattaagcttctgatatgtgacagtcactgttgtaggtagcatgtgcttccccgggaggtgctggagagcagttccagggccaggaactggggctgagcttattgagtattggtgaaagaggctgggatgtaatagactatcagggttgggtgtgtcttaggaagttaggaattaggtggagctgggaggctgaatatggaggcttggcatggtttgaaaatctatatgggatctagaacaggaccagggccttgtctttgcaggcatgctgtgggggaagcgaggagacagatgtaggggaaacctgggcgttaagggctaatagtgtcattcctcttcatccgtattgagcacttgaggtgctctaaatgtgtggcagaagtcaggctttgagtattcacagccattctctgagatagatgctcctatttcgtgcatttacaattaagcatactgagttgtgggttagggattttgaagctttctaggaattttgagattggatattgtcttatgagtagcagatttgacagtcatggggaagcttacagctgaaatattcatatttttctgaagccctaatcaagacatccacctgtttgatggatgatctttcaactgcctgactggggaatcatatcaaagaatttccatgacattgcaaaggctttgtgcagatggcgataggtaaatgcctcctgtgaagttttccttcggcatgtctttctgaagtttagcgttttcattttaaaaatggcatactggttttgcagatcactcaatgaagtttccaacttaggtgtataaatacaatttgggggtggtcctcaccatcgaggacagttgatgctctaggaagccgtgtggtgtttaaggcatggtgttgaatattgcccagcacattggccttgggaaaggtgggtttataggactgtggaacacaccctttgaaatcacagtgcagcacacacaaaaaaccttggtgttggctttgcctcttaggaggccagggaatgaggtcttgaagtttggataggttgttggggaagctgcgggaattgaggagtgagatgttaaaagcggaggccagggaggcctccctttgacataagaggcacctgagacccagaaaaaaggaagagaattgctcctagtccctggggtgtctgtgctgggtccagcgcccacccaagcacagggtggagtgggaggaggtggaggagaggaggggtgccagaggggatgctgagggagatagtgtggggcccttgaggtcttcatgtctatcctctacttccatcctttctcccgggacctccactccaaactctcccccctggacccccaggtgaccatggaggaagaagatgagtctcgagggaagacagaggagtcgggggaggatcggggcgatggtccgccagacagagaccccacgctttctccttctgcctttatcctggtgaggctgctgggctcctggcactgagggatggaggagctgggcatccacactccaggggcctgactccagggcctgaggcaggggcgctggactcttggctcccttgaagcacttgagtctagctgtcagtgtctgggatgtctgtctcccaaggggcagaggttgcaaagcatctgcctgggtcctctgacgcttggttcttccccccttccccagcgagccatccagcaggctgtgggaagctccctgcagggggacctgcccaatgataaaggtatggcggcttccggttccttttagcccctgccccctctctgcattctttatcctaatgtcattcatacaagcttttctgaagcctcctgggtgccacccttgtgctggcatggggagccaaaaatgggcagacaccctgtagctgccttggaagggcctagtgtgcagtggaagggagacaggcacagtgctgggagagggcaggaggcccacttgagctagcatggtgggagacgggtcagggcaccttccccgagcagggacagtgaacggctctctaaggacctagaagagtctaaggacctaggattagagggaagcctgatcagctgcagcaggcctacagcacgggtgcagcggcgaggggctgcgctgggcttccttggggctggcatgcaggagggtgtgagtggggttgggggaggcaggagaggtctgtggggactggatcccagcaaggcctgaatgccaggttgaggtgtctgagggcagacaggaggacgaatggctgagcgtcgcagcctctgaagtgggtgctgggaagtcctcctgggaggtggcgcatggaggcctggagagcatgcgggaggctggttccgctgtcaggaactagatcaagctcctctttcctctaccccgcaagtctctgcagcaagtcccctgtgtccaatcccccatgcaaatctctcaccagatggctctcggtgtcatggccttcgatggcggcgctgccggagtccacggtcagagccccgttcccaggaatcagggggcactgacacggctactgtgagtaagaagagggggctgggggcctggctcacgggtatcagggaggaagggatgggggcctgagtctgggggaatggggtttggggacctggactcctggctctgcgatgctgaccaggggcaatgttggagagtctgggggcctgatctgtgggcctgagctttgagtgttgatggcagtcaggctataggaattagatcctcagttttcttggggatcttagatgtctgggttcctgagaggttagggagtggggaagcaggatttgccagtcttcatgtgaccagggacggcgtagagcctctctggcctcttccaggtgttggacatggccacggacagcttcctcgcagggctggtgagtgtcctggatcccccggatacctgggttcccagccgcctggacctgcggcctggcgagtgagtagctgggcagctggagtgggagaggcctcagcgtgagagccagaagcacccctgaggctcacccaccccttccgccttgcagaagtgaggacatgctggagctggtggctgaggtccgaatcggggacagagatcccatccctctgcctgtgcccagcctgctgccccgtctcagggcctggaggacgggcaaaacgggtatgtggggccagggcggagctgggcaggtggtcgtggagttgtgtggggatcggctgtttttggtagtgatggtagcggtgatcatgttatttagacaaaacctttcccttctcttcgtattagacgtgattaaggctgtaggcgcatacagatgtacataaagtaaaaactgatgtgctggggctatgtgggagtggtcagcgtgtgtgacaactggtttcggcacgctaagtattagtgtcactgcactgggcgttcatctccccaggagggggactcttcgaatctctatcttcagagaagcagacagcctgaaaaagggcaggcacttgcccaagggcgcacagccagatgctccgtggggtgcctgggccttgagccctggtgtgtctgagtctgaagcccaagtttttgatgtctgagatgtgcgctgcccaaggaggaatctcttcctccaaccccacacacaacggtaaccctgtgagccctttagaccaaacgcgaacgcacatctcagttgcaaggaggacttgttactatgcacatcactgggcccactcccaagagttctgattctgcaggtctggggtgggacctgggaattttcattttaaacaatacatgctgctgagccctggactctgttgagaaccctgggtttaggccttccttctacgtgaacatctgtatttggaggaggggttggagggagaggagaagaaggtgcagtcagctatgggcaccagctgtgagccgtgagcaccagttctgtggtagagcaggcacaccactctgtgccaggtcatgtttaccttgtttaccttgtttcgctgtgtcgcccaggctggagtgcagtggcataatctcagctcactgcaacctccacttcccgagtacaagcgattctcctgcctcagcctcctgagtagctgggactacaaggtgcatgccaccacacccagctaattttcgtagttttagtagagatggggtttcaccatgctggccaggatggccttgatctcttgacctcaagtgatccgcccgcctcagcctcccacagtgctgggattacaggcgtgagccactgtgccctgctaccttgtttgttttttttgagacagggtctcactgcgtcccccaggctagagtgcagtggcacagtcacagctcactgcagcctcaaattccccggttcaagttatcctgttgtctcagtctctggagtagctgggactacaggtgcatgccaccatgcctggctagtttttttttttcttttttctttttttgagatggagtcttactgtgtcacctaggccggagtgcagtagtggggtctagtctctctgcaacctccgtctcccgggttcaagtgattctctcctgcctcagcctcctgagtagcagggattataggtgcgcatgccaccacattgagctaatttttgtatttttagtagaggtagggtttcactgtgttggccaggctggtctcaaactcctgacctgaagtgatccgcctgcctcaacctcccaaactgctgggattatgggcgtgagccaccacgcccagcctttattttttatttttttaaaatttttaatagagatgaggtcttgatatgttgcgcaggctggtcttaaactccagagctcaagcaatcctcctgccttggcctctcaaactgctgagatcacaggcatgagccaccatgcctgccacacccccccccctttttttttaacagctggaaatgatttatccattaagtacagtgatatggtgcctaggacttatgacattcttaggggc[139 bp omitted]ggtgaaaccctgtctccattaaaaatacaaaaattagctgggcatggtggcacacgcctctagtcccagctactcgggaggctgaggcaggagaattgcttgaaccaggagatggaggttgcagtgagctgagatcgtgccactgcactccagcctgggtaacagagtgagactccctctcaaaaaaaaaaaaaaaaaaaatcagaagctgcagaggataagtaaacaaatgggtcaggcaacgttcctctaaaacttgatttaggaaaacaggtggtatgctggatttgacccctgggccttaagagtgataagggtgtatccggaagctaatagtagttgttttcagggggactctgaggttatgttttctttgcttattccaggtagctttaaaaagaaaagaaagttcacccataatcctgtcccatacagaaatttatataaagctgtggatctcgcgtgtttgcagagcgctctagtctgtggagagtattttgtgcttaaggtgctgggaatagcaatgaggctaggaaaagctgaggctcagactgtcctcacccagcagcaggtgcagcctggctctttctgcgcactcatctattcctccgcttatcctgggaagtaaatgctgtcatcatcacccctgtttcatcttcccctaagcccttggcagctgagggaccgtacactccactcattgatattttttttgtttgtttttgagatgaagttttggtcttgttgcccaggttggagtgcagtggtacgatctcggctcactgcaacctctgcctcctggtttcgagtgattcttctgcctcagcctcccgagtagttgggattacaggcatgtgccaccacacccggctaatttggtatttttagtagagatgggctttctccatgttggtcaggctggtctcgaactcccaacctcaggtgatccatccacctcggcctcccaaagttctgggattacaggcatgagccaccccacccggccataaagggtgttggatgaatgaacatacccccattttatagatgaggaaactgaagtaagacacattgatccacttgcctgtggtcatgtggctggtgagggccagcccctggatcaaggggtggctctggtgctgccctcttgacccctctccttccctggcactgtcctcacaccactctgctggcatccttgcctgtggtgtggcctctgtcagccatctccatcgtgtgactgtggcatcatgactgtagtacttagcacagtgcagcgggctctttgggggcgaatgaggtgacatacgaagcaccatgcctggtttggaggaagaggcaaacctttgtcattgccactgtcactggtcagtggtgtctttgagtcctgagcagatgtaattccttgggtggggactcagcacagagtgaagagcttggggtgaagaccagccttcctgggctccccagctctgccatttcctggctctgcactggaatctcaccctctaccaaacgggagaaactcccacgagaggcagctggcgcagcaggccagagcttgtttttgtcttggagggggacttaggtttgaatcccagctctccccctgcagcctgttttcctgtttcttctccccccaggatggagtgtggtgttgtggtcatagctcactgcagcctccacctcctcctgggatgggtcgccggcactggtcaagatagttcctagtttcaaggccagggtacattgcccagggtcaggccagtgctgtctcaggatatgggagtgcaggttcggggccgcactgactgagtttacaccctgactgctgccttctctctgtgtgcccttggggaggatactgcagccctctgcctcagtttcctcctgtgacctttgggttaagaaccatggtgtgcagttgttgggagcatcctacggctggctcctgtgaagcacttggggcttcctgggcaggacctggtggcccagggagtgtccacggctgggccagcaagcaggcaccaggagggaggcaaaggccctgaccgcctctctctccctgttcctttgcagtttctccacagtcgaactcctctaggcccacctgtgcccgtcacctcaccttgggcacgggagacgggggccctgccccaccccctgccccctcctctgcatcctcctccccttccccttctccctcatcttcctccccttcccctcccccacccccaccgccccctgcacccccagccccacctgccccccgattcgatatctatgaccccttccaccccaccgacgaggcctactctccaccgcctgctccggagcaaaagtacgacccttttgagcccaccggctccaaccccagctcatcagcggggaccccctcacctgaggaggaagaggaggaggaagaggaagaagaagaggaagaggaagacgaggaggaggaggaaggcctgtcccagagcatcagccgcatctcggagaccctggcgggcatctacgatgacaacagcctgagccaggacttcccaggtgacgagagcccccgcccggacgcgcagcccacacagccgactcccgcccctggaacgccgccccaggtggactccacccgggctgatggagccatgcgccggcgggtcttcgtggtggggaccgaggcagaggcttgtcgggaaggcaaggtctcggtggaggtggtgaccgctggtggagccgccctcccgccgcccctgctgccgcccggcgactcggagatcgaggaaggggagatcgtccagccggaggaggagcccaggctggcgctgtccctcttccgccccggcggccgggccgcccggcctacaccggccgcctcggccacccccacggcccagccccttcctcagcctcccgctccgcgggcccccgagggggacgacttcttgtccctgcatgcggagtcggacggcgagggcgccctgcaggtggacctaggggagccggctcccgcgccgcccgccgccgactcgcgctggggcggcctggacctgcgccgcaagatcctgacccaacggcgggagcgctaccgccagcgctcgccctccccggcgcccgcgcccgccccggccgccgctgctggtccgcccacgcgcaagaagtccaggcgggaacgcaagcgcagcggcgaggccaaggaggccgcctcgtcctcgtcgggcacccagccagcgccgcccgccccggcctcgccctgggactccaagaagcaccgctcgcgggaccgcaagcccggctcccacgcctcgtcgtccgcccgccgccgctcccgctcccgctcccgctcccgctccacccgccgccgctcgcgcagcaccgaccgccgccgcgggggcagccgcaggtcgcggtcccgggagaagcggcgacggcggcggcgctccgcctccccgcccccggccacttcctcatcgtcgtcctcgaggcgcgagcggcaccgcgggaaacaccgggacggtggcggcagcaagaagaagaagaagcggtcgcggtcccggggtgagaagcggtctggggatggcagcgagaaggccccggcgcccgccccgccgccctctggctccacctcgtgtggtgaccgcgacagccgccgccggggggccgtgccaccctccatccaggacctcacggaccacgacctcttcgccatcaagcggaccatcacggtgggccggcttgacaagtccgacccccgaggaccctctcctgctccggcctcctcacctaagcgggaggtcctgtacgactccgagggactgagcggcgaggagcggggcggcaagagcagccagaaggatcggcgccgctcgggggccgcctcctcctcctcctcttcccgggagaaggggtctcgtcggaaggcgctggacgggggtgaccgggatcgggacagggacagagatagggacagggacaggtcatccaagaaggcccggccccccaaggagtcggcgccttcctcagggcccccgccaaagccaccagtcagcagcggctcaggctcttcatcctcgtcgtcctcctgttcttcccggaaggtgaagctgcagtccaaggtggcggtgctgatccgcgagggtgtcagcagcaccaccccggccaaggatgccgcgtcagccggcctgggctccattggcgtcaaattcagccgtgaccgcgagagtcgctcccccttcctcaaacctgacgagcgggcccccactgagatggccaaagcagctccgggcagcaccaagcccaaaaagaccaaggtcaaggccaaggcaggggccaagaaaaccaaggggaccaagggaaagaccaagccatccaagaccaggaaaaaggtccgcagtggaggtggcagcgggggcagtggtggccaggtgtcgctgaagaagtccaaggcggatagctgcagccaggcggcaggcaccaagggggcggaggagacttcctggtccggggaggagcgggcagccaaggttcctagcaccccgccccccaaggcagccccaccaccccctgccctcactccggactcgcagaccgtggacagcagctgcaagacacctgaggtctccttcctgcccgaggaggccactgaggaggctggggtccgaggtggggcggaggaggaggaggaggaagaagaagaggaggaggaagaggaagaggaggaggagcagcagcctgctaccaccacggccaccagcactgctgcagccgccccaagcactgcccccagcgcggggtccacagccggtgactcgggggcggaggacgggccagcttcccgtgtctcccagctgcccacgttgcccccgcccatgccctggaatctgccagctggtgtggactgcaccaccagcggcgtcctggcctgtgagtgtcccctgggggagggtggtgctggggcaggtgagacaggatggggactggagggtacagacttagaggcagtggggtgccctggcagggagaggtttatagggacatagactgggagggtgggggtgagtaaaggccagccaggctctaggtgcctgggtgtactgggagagaggggccggtgagagcaggtggtggccagcacagactggagtggtgggctgggttctgggattcccctagacggggagtaggagagagggaccagaaagaatggcttgagcagggcatcgtattccttacggatggcggttgcctctaccagactgcagaggtggggagagaggttgggactggccacagcgggtcaggaggcagaatctcactcctgccactgtctcatcactgcatgaccctggccaaccccgcacccacacacctggagtcccaagaacattcgtggtatgggctgttctctcattggccaaggcccccttttcccagttctgagcgtgaggctttgtggctgttctggggccaagggcaggagatgacagcaggtgtccaggtgaggttcaccagctcctgtcctgtcacctctcccatcttcatgttgtcacctctctgcctcctgcagtgactgcacttctcttcaagatggaagaagccaacctggcgagccgagcgaaggcccaggagctgatccaggccaccaaccaggtgggctcccctgggggagagtccctgccgccccttcttttgtccattgcctcgggttaggagaggaaccgcgggcctggcagctctggggcaaggtatcggcctgaagaggagcctgttgcctcagctgtggggaagtcagcgtgggaacagtggggtgcacgtcccctcttcccctccacctccctttactcatcacccctctgtcctcgtcccacagatcctcagccacagaaagccaccctcaagtctggggatgaccccagctcctgtgcccacctctttgggtctgccccctggcccctccagctacctgcttcctggcagcctccctctggggggctgcggttcgaccccccccacccccaccgggctggctgccacgtctgacaagagagagggcagcagcagctctgagggccgtggggacacagataaggtgagctggcctggggagaggtggggcggtgctgacagttctgtagagaatatggacaggaactgagacgcgggggcccaaggagaaagggagactgaggcagggagacagggccgtagagaccaaagtcatggaaccataaggaactccactttgctggaatgggtgagcaggaaatgcgttaggcgtgtccaaaggaaaatcgcgtctgtgcgtgtgtggggctgtgtgcgtacacaccacatatacacaccctggaagagatgccccgcgctgcagcccaccccttgattatctgttgctcgcgctgtctccgtctctgtgagtgggggagggtggtttccgaatgaaaactcaagaacctgtttgtagatgaagcaggggagaatgggtgccaggcagacagtaatgtaggttcttactcagctgctctggccggctcctactcctgggctctggagctgtttctctcttggtcaggtctagatgtgggtttttgtttttgtttttctttgagatggagtcttgctctgtcacctggtctggagtgcaatggtgccatctcggctcactgcagcctccgcctccagggttcaagtgattctcctacctcagcctcccgagtagctgggatgacaggcacccgccaccacacccagctaatttttgtatttttagtagagacggcatttcaccacgttggccaggctggtcttgactcctgacctcaggtgatctgccagcctcggcctcccaaagtgcagggattacaggtgtgagccaccgtgcccggccttggttggttggtttttgagacagggtctcgctttgtcacccaagctggcatgcagtggcacagtcacagctcactgtagcctcagccttgatctctcgggctcaagggatcctcctacgtcagcatcctgtgtagctaggactacaggcacgcgccaccatgcccagctcatttcttaattttttgtagagttggggtctcactatgttgcccaggctggtctcaaattcctgagctcaagtgattctcccacctcagcctcccaaagtgctgggattataggcatgagccactgcacccagcctagatgtgttttcttacagtctagtagcccatagccagacggtgacgttggccacccttacacagctgtgtaccgtgccagataaagctgtataaaccccattaaacatcctgtgtgagccgcagaggcggggctgcagtttagtcggtcacttgtccgtagcttgtgccttgcgctgcaggactcggacggtgaggaccccctggtctacagtggcccttgctctgccctggtctgtgctctgccctttgccccgctttgcccatccgagatgggtgttggggagcagcgtctctctagagacccacatcctgtggggccaggcaagcctgagaagtccctccagggcagcctgtgtctcttctggccacagagttccctaacagctcagtagctcgtcagacagtgtcactgatgttgctcctggagtcggctagccattgtgccctgcccttcccaggactcagtttacctgcccctactttgatagtcacctggcttgggagggcagcttctccaagggtggtgccaagggactgtcccttgtgcctgcagaaggcctgttcttctctggtcccacgtggctctctggctagaggtttcctgtctgcttttgcaaggattctgcctgaggccagggctgcagctgctgccccgagcctgcggctgcgggatctcctagcttgctggccacaggcgggaagagccttgcctcggaggctctctgccctgtccctgttgcgtcctccccttttcatcccatggccatcccccttggaacaggcacagctcccctggattgagtctttgctctgtacccagcctgtgccatgtcctccatgtgtgtcgctgtagtactgcccataggtgctgtccccgttttacaaatgagccacaaaggtggccaggcacggtggctcatgcctgtaattccaacacttcgcaaggccgaggcgggtgaatcgcttgagcccaggagttcaagatcagcttgggcaacatagtgagacctagtcgccacaaaaagtacaagaattagccaggcgtgggggtggcacatctagtcccagctattcaggaggctgaggtgggaagatcgctttagcccaggagaccaggggtacagtgagcagtgattgtgccactgcactccagcctgcatgacaatgagagaccctgtctcaaaaacaaagaaacaaaaaaggagccacaaaaaggtttggctgagcatcccaggggtcagagacagggagtggcagaccaggcttctgatacaaatgggctcaaggtcagtccccacccccactccccagtgcccctcacccctagccaccccctccatcccctgggtgaccagagcagtactgtaaaaacctaaactgagtcctccccgctcccgcggtgaaaagccctgtgcagttttctacagccccgcctctagagtctgattcaaaaccagctgcaatttcttggccaatgcctgtcttctcatcagactgaactttgtgagggcaggcgacacacatgtcctggtcccggccaggcctggagcagcccagggttcggcctggaggagatgttcagtgacatgcagaggcccaggcctggcctttggtcccgggcacctgcagcagagggcgcatgggacagaccctcagcaggacttccagcctgagagcagctggacggccagagaggttaggctggcagcagaggcgagtggaggtggaggttccgcaggtactcactggcccttgctgtgtcttcccccgctgtcgccaccccaccagtatctgaagaagctgcacacgcaggagcgggcggtggaggaggtgaagctggccatcaagccatactatcagaagaaggacatcaccaaggaggagtacaaggacatcctgaggaaggccgtccacaaggtgggcacccggagagaggggcagacacaggccggggagagaacgagctggagggacagatgtgtgcagacagatggacgcggatgggagacggggaggaggtcagtctgggaggtgaggagggtgacaggattttctcaaggccacctgggcctgttccgctggccctggggcacccatcgtctagggggacagagggactttggcctggttattggggaagctcctcctaccgcagttccaagctgcgcccaacagtcctgggtggatggggccccgggagcctggtggtgactccaactgtccccggccccccagatctgccacagcaaaagtggggaaatcaacccagtgaaggtgagcaacctggtgcgggcctacgtccagcgctaccgctacttccgcaagcacggtcgcaagccaggggaccccccagggcccccacggccgcccaaggagccagggcccccagacaagggtggcccgggcctgcccctgccccctctctgagagccctggccagctcttcgcccctcacctctttgaaactctggacgtatttatggctccacctccccacctccctcccccgtcagtgggatgactgggggagggttgctgcagggaagaggagagccccctgccctgccctgccccgtgtccacctcccttgcccccaagcctgtccccagtgcccctcccttctgtttgtgcccctctccccaatttcattaaagatttcatgaaacattacccctgagccccatggttctaaccctttgttttcggagacaaatttgccagagggttggggagggacccccaggaggctgaggatgggagacagagaccagactgtgacttggggcagctgcctcccctgggcctcagttttcttatctgtgtagtgggtgttgtgatgattgaacaagacacaggtggagcacttagcacagtctctggctgggagcgagctgctcacagggaggcaggggccggaccccacctgatcagcatcttcccagctcggctcctgggtgccatgtgcctgccttggaattgctcccagagcaggatctgtgttccccattgagttggcttctcttttcagcagccccgtgaagctggggtgatctcatcaactgtcctgagagggaaactgaggcacagagcagcaagggccgaagggtgagtcagggctgcgctggcttctgccagtttcatcacccagaactgcggcccaaccaggagaggtgacagtgcccagggtcaccaggcaggcaggctttgcaggctccagggtggccgcagagcccctttaccaagacccctccagccccacgtggaggggagcctgaggcctggaaggagaaggaccacttgcccaaactgttcataggcaaggcagggggcctgggttctggctagtctttgtgtttcctactctgtgacctttgcgcctctcccagcctgtgtcttggtctacaacacggggacagccatcacccaccaggtccctgggcagaagtgaggaggtgtcagctgccccctgcagtgcttggtcttcatgcattgagcacctgagttgtatatagctgcacagatgggtaaactgagaccctgagcgggaataacaaccatattgggtcagagggcacccaacaccagacacgcacaagtgatcatagcaggaaccagtttattggttgaggtggtggggaacaggggggttggaggcacaccatgaggagcgagggctcagctctccccagggccctggaaatccatgccctccaccaagtcctgcaggtaggccttgtactggtcggaggtgagggagagtgggtggctgttggaaatgtgcaggtccacagtattctccagggaggaggcaccccctacccgggccatttctaccaaggccctgaggcacgtgggcacaacctgcaggggaagtggggacaggagtcagggaaaacacccagccactgtccaccaaggtaggagtcagggcttggaggactacaactccctgcagcccctgctgtaacctaggatgaaccataggcctagggctgctgggagttgtagttttacacacacacacacacacacacacacacacacacacacacacaccccctgctgtaactgaaccataggcctagggctgctgggagttgtagttttacacacacacacaaacacacacacacacacacgtcagggctgagcagtctgtgatcttgactcctgggagccacagccatggcctcacaatggcagctaaaacttgagtccaccagcttctacatggtttagagcaggggtccccaacccccctacggcttgttagggaccaggttgcacagcaggatgtgagcagcgggtgggggaatattactgcctgagctctgccttctgtgagatcagcggcagcattagattctcagaggagcacaaactctatcgaactgcgcacgtgagggatcggctgctccttaagagaatctaatgcctgatgatctgcagtggagcagtttcatcccgaaaccacacctccctgtccgtggaaatattatcttccatgagactggtccctggtgccaaatagtttgggggccactggtttagagagttcaaaacaggttctgcaggtgaggccatgggaaggagctcccggggatgaaaaactggttattgcagagatcttggaagttgcagttttttagagggccctctgggagttggagttcctgggagcaacctcttccctctgtaaggccacccctttcagccccagggactcaggtctgcaggcaccttgaccatcacgagcctcttggtccacggctggtcctggggccatgactcccccacacagaaccagagggcatagcgtggtgagcgtccgcttccttccgtgaaggtaatcagatctgggggcccaggagcctagtcagggatgagaagaggaccctctacccacccttccccgtaaacttgaatgataacccccaccacctcccctgacctaaggccctctgctgcctcgaccaggggactgcttgtttggggaaagtcccctccttccctccctccctccctcccatcagggtggggttgttggaaggccacacccccaagcccccaagcctcagcattcataacaggcccagagtagggggcccatgctcccaaggatgctcagtgaatctggagaagctggttggcattcagtcctgtctgaggctgcattgtccaattgcagccattagtcatgtaaggttatttcagtttaaattgtaaccaattaaaacgaatcacgtcctggttgcactcgcctcacctgagtgcttggcccctgtggctagtggctgctgcaccggacagtgcaggtgactgtcatttccatcatggcagaaagtgccactgcacagcgaaaccctaagggatgtagctttcctgctattggtctgttcaccatcattagttacgatgatgatgacagtggcagctaattccctgagcaggctctgtgtactgggcctgtgtctcaccccagcgctggcaggcaggtagagagaggagaccatccttggattccacgggctcagggcaaagtcctttgcctcggttatacagcgggccaagggcagccagcgtctgaattcagtcctaatcatgagttcttttttttttgttgttcgagatggagtcttactctgtcaccaggctagagtgcagtggtgcgatctcagctcactgcaatctccgcctcctgggttcaagcaattctcctgcctcagcctcccgagtagctgggattacaggcacgtgccaccacgcccgactatttttttgtatctttagtagagatggggtttcactatgttgaccaggctggtctcgaactcctgaacttgtcatctgcccacctcagcctcccaaagtgctgggactacaggcgtgagccaccgtgcccggccaatcctgagttgttaaccactgtgcaggctgctttgtactggccaggtcgaagcccctgtctcactcacctacaatgaagggccccaggtcaaacacgcctccttccttgtccttggggacctcgccatcaggcccatgcccgctgttggggagcagctcctcgctcactgcccagtatgtgtggcagtgccccagccgctgggcccagagccactgcccggcccgccagagagccagtcccccacccaggcagctcagcacatgcctcacgtagctcatcactcccctgtctgtcagggacatgccagggtctggcagtgtgactggccatccaggcagcgtcctgtctcccacttcggaccccaccagccgcaggccctccgggcaggagatggtctgctggaagacttggcggccccggtagaaggctgtcacctcgaactcccactctgagcagcggcagcagcggcatgaaggggagaggggttgagaatcaggggctgccgcccagacctcagccctcccagcctgcagctgacactcaccttcccccggcaccaacagccgcttcagtgggttctcagagggccccaggtttgggaagggagtgggattgtccaagctggggctccgcaggggctgagggcagggctcaggggctacagccaggcttgggggtcccggatctgggagtggggccaacaccatgttacccagtaactcatccagaatgtcttcctggagggaaacaaaaaaagagaatcaggcatttccatatccttttctggagacttcatatggaccaggtctgttctcagcaacgcagggaggtcaggcttgagctctgccttcaaggggcttccagcctggggacagagccagccatggcatcaacagccaaacaaacactaatgaacgccaggtgctaccattccaacccaaggatctggctctatgcaggtaagacctgggcaaagcaggctgggtagaatttcagaggggatgctcccccagcttgggcctcagcaggatcaaggtgagggagtttttcagttcccaagaggctgacagccccctgcgaatcgaaatccatgaaatcccgggaaggtgtgctcgggccttgaatgctgggtgaagacttggaattttctcctgaggagaccggggcagggacagacagggtcagcactggctcaggtgaggggcaggctggaggcaggggagtggggggatcgtctagagggagaggacaaggcccatggagacaggtcggagactgaggggcatgaaagttgggcacattctcacctgggtatcagaagtactgcctccaccattggtgtccggagaggtgtctggctgggaaaagtccccaactcctgttgagaaaagtggtgaggggagtaggagtgccaggaacccttggggccccagcctcccacacgaaccccaagctggcagacctgagttcacaaactcgtagattttatgtgggtcgtgagggtccttgctccggtcctctgctaaacgcaacccttctttgcggttgagggcagagcggaaattcctcttccaggttggcaggtctggcttatccctcccgggaacatatgcaccagtggcctcggcccaggcctggggcaacagtggtgtcaggatggtgggggaggacgacttagatcctgctcctggggccctaaccctgtctcccgagtcctaacaccaccctctttccctggcaagttctaactctgcaaggtccatccccaaatccccccgtcccacctacctccatcccccacctctagttttcaaaaggctttttttctttttgagatggagtttcactcctgtcacccaggctggaatgcaatggtgcaatctcagctcactgcaacttccgcctccccggttcaagcgattctcctgtctcagcctcctgagtagctgggattacaggtgggcaccactacacctggctaatttttgtatttttagtagagatggggtttca[132 bp omitted]tttgttttgtttcgcttttgtttttaaagagatggagcctatgttgcccaagctggcctcaaactcctgggctcaagcgatcctcccgccttggccttgcaaagtgctaggattacaggtgtgaaccaccgcccccggcccaaaaaccttttctttctaagccaggcttccaagtccaacttggtgtctaatcccgtgcaccacctgccccgcgacaccctctgtgataaccccgcccctcacactgtttaccacctctggcatatactaattcggtagttaggaacctcagatttggggctccaggcctcacctctgatgtttcaagaaccatcccccagtatctatcctacaaccaagagccccggcctctagaaagccccaaacccccaggatgcatttcctttgcgtactaaccggctttcccggttttattcccgtaaccctgcagctccaaccctgcttgcgccccaccatcagtcagcggatccggctagccccgcccctcccgttctagccccacccaccagcgttggcacgagcccgcccctcgcgcgccacctccgccttctcagccgggcccactaggagtcctttccgcccagcgcgcagctccgggtttccagcgtcccaggtcgtcgcacgcacctggaagattccgaaatcctcctgctgtgcatcctgccgtaggccgtgcttccaagggatgcggaagcgcgtgcggctcttgttcacccaggccacgccctccagttgccccaggtccagctgcgacaccagccagggcaggatccgtggctttggggttcccatggtccggcctgcgcgtatagggcatttcctgggcgcgaccggcctcccccggacccacctggcctggagtttccgcacccagacctccttctcacgggccacggcacaggtccttcacccatattttcgggggtacaaacaggaaacctcctcttcccatcctcccatcctcccgagaggctctctaatcagctagggttccttcccatatccatggcacatccttccccagcgtcttcagtgcagaccctccactccctcaattccgccagtatagacctcctccctcccccacatcatcgaaagtaagtatccccactttcagggtagcatcctctttccctagttatttcagtgcagaatcgattcacgtgtaagcctctacctcctgcacttaccccaatgtagacccccttccacagtccccctacagaagatctcccaaaacatttccaacacagaacttccattcaattcccctccgactgcccgcctccctcctccaggacagagcacgccccaggtttcgagactgaactacccccatctacggagtccacccctccctctctagaaccccctcagtgtagacgcctcctcttttcctctttcctccctactttttctagtttttctgcagccgacctccagcgtcggccactgtagctccttccttgctccactttccccagagtacacagcctgcctttccactctccgtgcagacccatcctctttcccgctcctcgctctcggacgccaccaacgctctcccgggctcttccgcgttacctacgatggaaggtcggggcgtgcgggcagctggaacccacccctgtcttggagctccgggtagctctcaaactcgaggctgcgcaccccctttcccgtcagctgagctctagagcgctggggctttctttttgatcgacttcttgaaataaaaccaactttatcattctttgggtaacagacccaaaagccgatgggacggcccgctgggctgttcccgcccctatgcccttttttgggtttccggccagaggcatgctgggagcgtcacatgcaaattgagcgtgcacccagcgttccgccctttctacgctgggccggttatcgacccggcccagtgcgcaggcgcgggaaagttgaactaataaagtttgtacgagttcagtggaggagaccgcaagttgagtggaggaggcggcggtggggccccggaccaggtcagcggggtgttgacgaggggtggggtgaggagggaagaggagggggccgggatccagtggtgggcaccccagtcccgcttctctgatatccaagggtccagggtcctctagattccagcaggggtcggagatttggaactacacctcacagcaggctgcgcggcgaagaagcgcggacctaggggaagatttgccctgaaacctcttgggattggtagttcccgatgctttaagggtttcaggagtttggcatatgcctcttatagaatccaggagttggggcgctaagcctcttcttcctgggagacctaagggtctggggctccagttcctttttctctaagactcagaagtccaggaccccagctccctcctcctttagacccacgaatctgggcacccagccccaccacctttccttggatcgaagagtctttttcctgatcgctttttcgtctgaggactcaagagtctaggcccccagacccacactctccaaaggacccaggagtccaggccctcagcaccttccttgggactcacaagtcctggtccccaagcctccacttcttgctaaacccttggagtccagtccctaaccctctctctcacaggtgcctccatggcaggctctgaagagctggggctccgggaagacacgctgagggtcctagctgccttccttaggcgtggtgaggctgccgggtctcctgttccaactccacctaggtaagaggagtggcccttctcccccaggggccagcatttgaggctccctcctaactcttgctcctggtctcagtctgtctcctctctttatatctggctctattctctgtctttggggttttggagagaggtcctcagcgggggagggagggagttggggaaagagactgcttgcaggggatctctggtggggtcagtctctgaagtcctcctctccagaagccctgcccaagaagagccaacagacttcctgagccgccttcgaagatgtcttccctgctccctggggcgaggagcagccccctctgagtcccctcggccttgctctctgcccatccgcccctgctatggtttagagcctggtaagagatttccatgatcatctatgaagccggcagaacacgggataaggtgctagtttaagatcactcagctagggggtggctgtgtggagtctctagcaccagccttcaggacagaaccgtcctgtcctctcccctccccagttagatttctgtcaattctgtgggttggctttcagagagcatttggtcaatctggttgttgtctctttccttccataactacttccctgcccctaggacttttgtagccaggaatacccctgatagaggggcagaagggctggttttcaatcacatctccctggctgttttagttgcgtgactctggggaaaatgctttctcttccctgctcccctgtttttccaatagcagagtaggaattggggaggaggtcactggacttgatcaaggtgacccacaagtttcctcataggtgtgaacctggacagactagtaatggctgctgggagtgctagcttgaaaaggggttcacagcttgggagaggaagtgctgtgatcaattggtgatgtctgtagtgagtgagggaaggggatactaacagtaatgtcttgtgtttgccttccttggatgagatcatcttcaaggtctagttgagctctgacagtcttttggagacagattgttgctctgtcacccaggctggagtgcaggggtgcaatctcgactcactgcaatccccacctcctgggttcaagcgattctcgtgcctcagcctcccgagtgactgggattacaggtgcacgccagcatactagctgatttttatacttttagtagacacggggtttcgccacgttggccaggctggcctcaaactcctggcctcaagtgaccctcccacgtcggcctcccaaaatgttgagattgcagacgtgagccaccgcaccctgtcagctctgacattcttttttttttttttttttttgagacggagtttcgcccttgttgcccaggctggagtgcaatggcccgatctcggctcaccacaacctctacctcccgggttcaagtaattctcctgcctcagcctcccaagtagctgggattataggcatgcgccaccatgcccggctaattttttttgtatttttagtagagatggggtttctccatgttggtcaggctgctctcgaactcccaacctcaggtgatctgcctgcctcagcctcccaaagtgatgggattacaggcgtgagccactgcgcctggccccagctctgacattctaagtccagtctgaggatctcataaagtgaaaagtacaagggttttggcatttttaaccaagttttctcactgggcctcagtttaccccattataaaatgggaatcatggccaggcttggttgctcacgcctgtaatcctagcactttgggaggctgaggtgggtggattgcctgaggtcagcctgggcaacacggtgaaaccccatttctactaaaatacaaaaaattagccaggtatggcggcgtgcgcctgtagtcccagctactcatgaggctgaggcaggagaattgcgagactccgtttcccaaaatcaatacataaataaataataaataaaatgggaatcattgccacctgccaaggtagttgggggaaggagagaatccgtaagtttccaatgtcctggaaacctgtcattaactcttttcaccccaggcccagctactccagacttctatgctttggtggcccagcggctggaacagctggtccaagagcagctgaaatctccgcccagcccaggtgaggcacagaggagccccagagaaggatggcggtgggaggatagtcagggttctgcccccagccaaattctcttctgcctccagaattacagggtcccccatcgacagagaaggaagccatactgcggaggctggtggccctgctggaggaggaggcagaagtcattaaccagaaggtgatgggcatctgtcccactccttggcaaggacaggagttgcggaatggtggggcactgggatcagaagctggatctgtattttctttggatggtca[141 bp omitted]gtgaaaccccatctctactaaaaatacaaaaatcggacaggtgtggtggtgcgcttctgtaatcccagctactcagaaggctgaggcaggagaatcgcttgagcccaggaggtggaggttgcagtgagccaagattgcgccactgcactccagcctgggtgacagagtgagactctgtctttaaaaaaaaaaaaaaaaaagaatagttgaatgacaggggtatggttagggtagtactgtaccgtaaattagttgttttaattgattgtttagaggggcatggcctaaatgcagagggtgtggccatcagaaacattatccacaagagactggccaagctggggaagtaagtgaatgaatgtgggggtggggggagtggctaaaatcttactgagcatagaagggacctggcttagaatgtaggggaaaatgtactaccagaggaggtgtggcttgtggctgtgtcctggaatctgattggcttcggagcttggacaaggtacatcgtcctttaatattaattgaatggtagagggcaagattgttgtagacactaggttggcccctgggaaaggtcaccaggggcatggctagattaactcagttacagtagagattggccctgattggctgttgaggcaagggcctggcatggcttagggactcacgttccaggccactatcccgggggtagtttggcagagaccctggagtctggcttgattggctaatatggatgaggggtggcctagaaccttagcatctagaacgatcctgaaccgggaagccacgcctcccggccctctattggctggccccgggggcgctgctgacgcggaccctgcctcttccaccctacagctggcctcggaccccgccctgcgcagcaagctggtccgcctgtcctccgactctttcgcccgcctggtggagctgttctgtagccgggatgacagctctcgcccaagccgagcatgccccgggcccccgcctccttccccggagcccctggcccgcctggccctagccatggagctgagccggcgcgtggccgggctggggggcaccctggccggactcagcgtggagcacgtgcacagcttcacgccctggatccaggcccacgggggctgggtgagccgctgaagcctctctctccgggcctcactttacctaactgtcatgtgatagaggaggggcggggacttcttaggttcctctcagacctcaggtattctcccagctccactgcgttcgttctgttgagcccttgctgtatgccaggactgcagcgatgagtgcagacactatgcctggcgtcaacgactgggtacgctaatactgtgagcgtgaaaccagtgactgaggttactcagggagaggccggacggggtagctcatgcctgtaatcccagcacttttggaggccaaggcaggagaattatttgaggccaggagttcaagaccagcctggacaacatagtaagaccccat[132 bp omitted]aaaccctgtgtctactaaaaaaaatacataaattagccgggcgcggtggcaggtgcctgtaatcccagctaccgaggagactgaggcatgagaatcgcttgaacctgggaggcagagattgcagtgagctgagatcatgccactgcactccagcctgggcgacagagtgagactgtgtctcaacaaaataatataataaaaacctggtgcggtggctcacacctgtaatcccagcactttgggagactgaggtgggtggatcacttgaggtcaggagtttgagaccagcctgaccatggtgacattcagtctctactaaaaatacaaaattagcccggcatgcctgtaatcccagctagggaggctgaggcaagagaattgcttgaacctgggaggcagaggttgtagtgagccgagattgcaccactgcactccagcctgggcaacaagagcggggctctgtctcaaaaaataaataaataaaaatttttaaaattaataataattagcaaagcatggtagctcacacgtttactcccagctactcaggaggcagaggagccgggaggatcacttgagcccaggagttcaaggctgtggtgagctatgattgcgccactgtactccagtgtgggtgacagagtgggaccctgtctcaaaaaataaaatagtgagagtagtagtgctacctcaaagggtcgctctgagggttaaaatggggtcaatgtggtaagccctctgtgcactgcctggcatgcaggcattttgttggtgaggttatatggctacctgctgcctttccaacagtgcctgccaggatgccctcccggggaaccccctgcctccgtcctgctccttctggtgggctctggtttcacccccaacgaggccttcccaggtccccattgacaatcacagccacctgcacaccctcccaccgccctccttcccccttcctgctttacttttccttccatagcactttgggccttccaacagatggtggaattgacttgttttacttgtcttctggtttatttttctttgttggtgtctcccacctctaacacatcagcttcaggagacccagaagtcttcccctctccttttcttactttatctccagtgccggtttcagagttggattgggctccagcgtgctggccctgtggcttggcgactgtcgcagtctccctgagcggcactctccccactggtccagtgagcaccgtctcatttacctgccttggggggtcgctgtgggtattcactgagagagggacacaagccaggctctggatggaaccggtttccctggcaggagctggtcaagtgtgtttgaggagcagggaggaggaggccagtagggctacagtagggtgagcgggcgacagatgagaggaggagaggcgccgggccagccaggaccctgtggtcacggtgagtgacaactcggactttgactctgggtaagccaaggtctctgagcagcggagggacaggcgctgatttaggcgctaatgggcgccctctggcggctgcctggggacagactgctgggggcgagggcagaagtaggggcacagggaggaggtgagtggatctcacccaagtcgggggcggtggagaatgctggatttaacttagcggtgaagctgacagatttggctaatgggccagatgtggggacagactaaaggatgctggcccgagcagctgcagggcgacatcttaagttccccgagatggggaaggtgtggggatgggggcgatgggggtggggagcaggactggaggtggtccggtctacagtaagatcagaactcatagcacatgttgaggggaatggatataagtgttgggctcagcaaagaagctcgtttattttattttattttaatttttcagatggagtctcactctattgcccagactggagtgcagtggcacgaccttggctcactgcaacctccacctcctgggttcaagcgattccctgcctcagcctcctgagtagctggggttacaggcgcacaccaccatgtccggctaattttgtagttttagcagagacggggttttgccctgttggccaggctggtctcgaactcttggcctcaagtgatccacccacctcggcctcccaaagtgctggaattacaggctgagctaccacgcctggacaatttcttaaaaaatttttttaaagtaggattgatagcagatgagttttctcggtgggccaggtcctctgctagggatttcaatggaatgatcccatttaaacccactacaacctcatggggctcttattgtcctcgtcttgtgggggcagagaggaaaagtccccagcatgcagagtgttggaatctggatttgtacacaaagccacgactctgaattgttcaaatcccaagactctcttccccatctctgactctgtcccccaactcttcactctctctggatctctgtctaatcccactccagtgtcctgaccctcctcgagctcaacctttcctcctcctgctaggaccctgccccctcatccctgtgcccttctgtctgggtctctgtccccttgtctgggtgtctgtcaccctccgctctctggttcctcgccttcccgtctctaatctcacagggctgatgtggacgctgctgtatggggggaacacctgccctgctcacagggctctgccacttttcccttccaggagggcatcctggctgtttcacccgtggacttgaacttgccattggactgagctctttctcagaagctgctacaagatgacacctcatgtccctgccctcttcgtgtgcttttccaagtcttcctattccactcagggctgtggggtggtggttgccctacctgtttttgccaaaaataaattgtttaaaacttttcttattaaaaacgttacaaagtattcaattgtctgttcttacacttgggaactaaagttttaaggagaggagatttggttcagagatttctgtggcttacgcaaattgaggaaagaaccagttcattcattctagaaatatttatttgcagcacctacaagagcctgtctcctggacatgtaacatatttgagagaatacctgtaaatattccagcaacttgcatttttttttcctattgcacgatctggttattctagctaatgctgtatgatggtcatggagtctttccagtgaattccacagaaaggtacagtctaacttcacctgtgtctaggacaccaccctcttcttgtttttctcctcccattgctcctttcaagtctctcttgctggtttctcatctacctacagaccagtggtttgtctcacacacaccccccactctccctttttttttggagatagggtcttgctctgttgcctatacttgcactgttatatagatacagtggcactatcatggctcactgcagcctcaacctcctgggctcaagtgatcctcccacttcagcctctctagtagctggaactaaaggcatgcgacacgacgcctagctaatttttaaaaaagaatttttatgggaggccaaggcaggtggatcacttgaggtcaggagttcaagaccagccaggccaacatggtgaaaccccatctctactaaaaatacaaaaattagccgggcatggtggtgggtgcctgtaatcccagctacttgggtggctgaggcacgagactcgcttgaacccgggaggcaagaggttgcagtgagttgagatcacgccactgcactccagcctgggcaacagagcgagactccgtctcaaaaaaaaaaaaattgtagaaatggggtctcccttatgttgcccaggctggtctccacctcctgggctcaagtgatcctcctaccttggcatcccaaagtcctgggatcacaggcatgagtcactgtgcctgggcggtttgtctcctttatagggccatatcccccttcacagagtaatgtttgtaaattaataagtgaaatgtacaggattacaaaccgaaccaattacagttgatcctcagtatttgtagattatttgcaaatttgcatccttgctacaatgtattcataccccaaaaattaaggcagtgcttttgtggtgttttggagggcaatgcttatgcacagagctgcaacaagctaaagacctgatgtgcatatttgcagctgggctcctcttgcttcagctcaaacactggaaacaaatgtccttttcttggtttgtttagtgccatgcttttcaatttttttttttttttttaaagttagagtctcggtctgtcgctcgagctggagtgcaatggcttcatcctggctcactgcaacctccacctcctgagctcaagcgattctcctgcctcagcctcccaagtagctgggattacaggcgtgtgccaccagtcctggctaatttttttatttttatttttatttattttattattttttgagatggagtctcgctgtgtcgcctaggctggagtgcagtggcaccatctcagctcactgcaacctctgcctcccgggttcacgtgattctcctgcctcagcctctggagcagctgggactacaggcgcccaccaccacacccggctaatttttgtttttttagtagagacgggggtttcaccatattggctaggctggtctcgaactcctgagcttgtgatccgcccacctcagccttccaaaatgctgggattacaggcgtgagtcaccgcgcccggccaaattttttttttttttttttttgagacaagagtctcgctctgtcacccaggctggagtgcagtggcgcgatctcagctcactgcaagctccgcctcccgggttcacgccatcctcctgcctaagcctccacgcccggctaattttttgtatttttagtagagacgggggtttcaccatgttagccaggatggtctcgacctcctgaccttgtgatccgcccgcctcggtctcccaaaatgctgggattacaggcgtgagccaccgcgcccggccgcctggcgtaatttttgtatttttaatagaaatgggggtttcaccatgttgcccagactggtctcgaactcctgatgtcaagtgatccgcctgcctccgcctcctaaagtgctggaattacacccgtgagccatcgcgcccgaaccctattgtaaattttaagtctcaggcgtttgccagcggcacgccagagagtatagcctgcgcggaggcccagaaaccaaagagcgagctcattccgggattggagagaagtgtgagcagagggaagtagagggatcggggagaggaggggcaggacccacgcattcggccctttgcattcagcttcattcaactaggaactttttctgcaaatcaaggaaagcttcccggaggaagtggtgcctaagctgtgctctgattcacgtttagaagctgaccagacaaagagaggtgggcgttcctggcagggggagggacttggcaaaaaccaagtggcttgagaggggttgatggttttaaaaaacttggaatgattatgtcaagggctagggatttaatgtgttgacgacggactcctattcctcacttgcttcgggaccccagctatgcccttcctctctctgggcctctcaccgattccgtttttcccccaggtaatgagcacaagctccctttttcctccagactccccccgggttgggaggatccaccgagtggacgaggagtgataattcctttgagccaatcgttggtgcctgaagccccgccttcttccctacccgtgggccaattgccgtgttctccttgaggccggccgcttggcgagggtgggccaaaggctgcgtgacgtcgcttccggataaaccaatggcagcgattaggaggcgggtcgttttggtgatggacaggtgtttcaagacgcccctttagcgcggggctccccgggaagctttgaggcggtgctgggtgtaaaggggagggcattcctggtggattttgcccaatcaccagtcgcgcttcttgcaatagacgggcagttttccccatcccgggtcgacttgagggggcgggattctggacgccagagttggcaaacccctgacctatgatggacgtattctctagccaattactagacggtattctcagacgggccgcctccattgccaatgaaatcttccagcggggtcgcggtaggcgggccgtggaccctctggtataaggcggtcccgggggagtgaggagaaagggggggtcttggcggccggaggaggagtaggtgcgggtgaagatggcggcagccgaggccgcgaactgcatcatggaggtgagcgcttggagcgccgccgtgggcgggaggcggctttgggtcggtgtttcacgcctctgtggtggggaaagggctctaagttggcgatatggggttggaggtcccccgccgcacacgggggcgccgcacgttccacatccggggatatcgtttgaggtgacggctccctagcttccaagggccttcggcatccggcctagcggagggtcttatcccccctcccacgtggaggagggctgggggcgcttccggccaggcccccacgtggccgctgcgcggtgggtggggagggggtgtgccgagtccagtggcccggcgggctccacgtgcgggacaaaggccccgcccccggccggggaggggcgcccaggggggcggggagggggtccgaccctcctgacgcccccagccctcctccccggggacctgggcacacgccgtggggtgtgatcgacctggggccctccacgatgtggggagtctcttgggaggagcagtgcttctcagccctttaccaacctccttccgagctccgggggcatctgttgggatatcggacccggttttgtgcgttctgggttagggactggaggaaaaccaagaatggggtcccccgccgaccccgtttcccctcccagaattctccccctcgcccagggctttaggagttgggggatggggcatgcccctgtgacctccctctgggtggtggtggggcatctagatagagattttcccattaataggcgccgtgcacccccttgtggccatttctgggtgtgtgggagggacatctttttcatggggcgtgtcctgaagcccacctcccctcggatttcttcctggcgggcggagggaggagggtatgtccgctgggaaggagttgtgggaaatatgtaggctgagagctttaccctactggagccgtttatctcccccgggtctttgtgagggtgcgagatgacctccttcttcctgaagccctgtgcagggtcctgagccctggggtcctgagagtgggtgcctgaaatggtttcgagtgaggtttggttctcgtgcagccatgtgggggaggtttcagtcttgcgtttcaagccctctggggctggggttgtctggcggtagttttcagtggtattgagaaataggcccgagtgggaaaccccctcagcacctttcttcttataggcatccccgctagcttgggagagctggagggagggtgcttggagcctagtaggtcatggcctgtgacgtggcccttcttggagacttggatagtggtcacatctggaagagatgtaatctgatggggcctctgtccttccaccccttacctatggcattggctggaggggcaggtcagctctcagctgtcaggatgcagctcccaggggtcactgtaatgacttcccaccctcttggctgtctcctgcacctggggctctatggatggaggaaataactttcccagaggtggcctcaggcttggccgcacctggaagtcttcagggcctgggatgggtgtctgaatgggggcgatggcctgactccccaagccactttttttttttttttttttgagacggagtcttactctgtcacccaggctggagtgcaatggcttgatctcggctcattgcaacctccgcctcccgggttcaagcgattctcctgcttcagcctcctgagtagctgggattacaggcacccgccaccaggcccagctaatttttgtatttttagtagagatagggtttcaccatgttggtcaggctggtctcaaactcctgacctcaggtgacccacctgcctcggcctcccaaagtgccgggattgcaggtgtgagccaccgtgcccccaagccactttctggagtcctctcattcttagagggtccaggagctgcccatcttccctgggaccctaccttcgtgggcagagggtcataagggagggggttggttccagctggttttgtttggggctcctgagtccaaggcaggagctggggtctggggtactagctctggggaagtacccgtgtgccacacctctattctggaatcctctcagacatgagactggtttgcagaggtggcagatgccctgtgggcatatcctgccagccccgctcccttctgctattcatggcaccctaggataggggtgtgtgtgtcaggaagtgtcacctaatctggaggagattaggtgatgagagggagcgacagctggcggtggtgggtgccaattcccctggcctggatgggggaggtgtgtggtcagctgcctggccagagaggggcagcgtgggggtgggccaccatctctccagccacagctgggataggagacccccctttcttctcccctcacttttcccaccctttcttaaacaccccacctcattacttgcccccttcgccaccactccccaccaagaaggagaattgctggaaacccaccccccggccagagcccaggttccgccacccagccctcccacagccactcccagtagctaatcctttttccctgttactctctcctagaattttgtagccaccttggctaatgggatgagcctccagccgcctcttgaagaagtaaatatccttttgtgagacccctccccaccctgacctccacatcaatatatcttgccacacatctggccctttcttgaggtctaaccatacccctcttgcttcaaaccagtttaccccaggcccccagacacttagtagcaacccctccaggttcacagcccccgctggcctcccccagtatcgccgctacttccttaactccacctccaacccccctttgcccttccctgtgtctgcccccattttccttcccctcccctccccagctgtgggctgagctagagacggggtcagagagactggagagatggtaggcgtggctgaggtatcggggtgctcccctggatggtgctctgggggggtcctggaagtggaaaatggggttgttaggttttggggttcctgggggggcaagatggcaggcgggggctgtagggttgtcatggtatgattttgggggttctatactactcttcagggaaaagtagggcgctggaggtttaagaggctgtggggagcccccagatctgacccatgatcccatcggccccctcccaggtgtcctgtggccaggcggaaagcagtgagaagcccaacgctgaggacatgacatccaaagattactactttgactcctacgcacactttggcatccacgaggtcagtggggacagtccccaaggccccaatcttaggggggcttaaatgttggggaaggggtggaacctgttttcccacgcatgcgcactgcttcccctggccgcaggccgcccccctgcccctctgctgcgcacttcctagggtcgcctcgccaagccgttgccttggagaccgaggttagcctgaatctctgcaggggcctcgcgccgaaggctggggtgggagagcgcatgcgtgcctggggccttagccagaggtcgggcagggcccactggtctctgccgccctctagtgaccggcggtgggactgcgccccggctgctcccgccctaacagcttctgcacacttcagatctgactgaagacactgaaatcccagaacgaagctggggtggcattctaaggaattttcttttccccctgaggcctttttcataaaattgtggcaaaatatgcataaaattgccattttttatttttagagacggtctcgctctgtcgcccaggctagagtgcattggtgcaatcatggctcactgcagcctcgacctccccggctcaggtgatccccccacttccactttcggagtagctgggaccacaggcgcgcgccaccacgcccagctgatgttcttatttttctgtagagataatcttgccttgttgcccaggctggtctcaaactcttgggatcaagtgatcctccggctttggcctcctgaggtgctgggattacaggcgtgagccaccgctcccagcctgaggacttttaaaagccagggttcactggttcttaggtagcagtggtgaagtccggccaagattggagtttagaccatctaatctgattttttaaaaagggaaactggctgggcgcagtggttcacgcctgtaatcccagcactttagggggctgaggtgggtggatcacctgaggtcaggagttgaagaccaacctgggcaatatggtgaaaccccatctgtatgaaaaatacaaaaattagccgggcatggtggtgtgcacctataatctcagctacttgggaggctgaggcaggagaatcacttgaacccaggaggcggaggttgcagtgagctgagattgcaccattgcactccagcctgggcaacagagtgagattccatctcaaaaaataaaataaaataaaaataaataaatgaataaatataaaagggaaactgaggtgcatggaagaaagcgagagggccgagctctggccctccgagctctcaggacacgctgttctccagctggggatatggggcccctcacggcgtctctgtgccattcttgccctaggagatgctgaaggacgaggtgcgcaccctcacttaccgcaactccatgtttcataaccggcacctcttcaaggacaaggtggtgctggacgtcggctcgggcaccggcatcctctgcatgtttgctgccaaggccggggcccgcaaggtcatcggggtgagtctccagggtggccaggcggggccgggcctgagggatggaggggagcccatcagggctcagggattggatggaggtgatgggggcaggggatgggtctcaccctcccttcttcctgggccctcagatcgagtgttccagtatctctgattatgcggtgaagatcgtcaaagccaacaagttagaccacggtgagcccagaaagaggatgggtttgtgggagtggagggggtgatgccctgcttccccagggccctctgaagagcagtggggtctacagatgaccacagattcagcagctcccaacccatggtcttttgggctgccggccgcctgagaatctgagtgtcaaaatcacaggcttagcaccgcagtcttaaaattagggcaagaagcactctctagtttcttgaatgagtaatagagtcacgtggttggccacggaaggcccacagtgagaagccttccctgtttcccagctgccctcctctgagtttaaccaacactaacttccagagaagtctggacctacaaacacatacatacgtaaatgcatttacattctcgtgcataattttcacgccagtagcatttcataccagcctcttgcccttggcttcttacacctgcttgtcatgtcgtttaacactttccaggatgttgcggcatccgctcttttgcatgaccaccatcataggtacatccccagcatttttttttttttttttttttttttgagatggagtctcactcttttgccaggctggagggcagtggcacgatctcagctcactgcaagctccgcctcctgggttcaagtgattctcctgcctcagcctcccaattagctgggattacaggcgccagccacc[137 bp omitted]tttttttttttgtatttttttagttgagacatggtttcaccatgttggccaggctggtcttgaactcctgacctcaggtgatccatccactttggcctcccaaagtgctgagattacaggcgtgagccaccgtgccatcctgaagtgatttttaaaaagagattattataatgaacgcacgagtccatttgaagcaaattcccactgtgatgtaattttcccggtaaatgcgtctgcttgtgtcttatctaatagataaaggctgttttgagaatgtgatcatgctgttacttattatatcaaaaccacccagttaaaaacaaaatcgcggccgggcacagtggctcacgcctgtaatcccaacattttgggaggccgaggcgggcggatcgtgaggtcaggagatcaagaccatcctggccaacacggtgacaccctgtctctactaaaaatacaaaaaattagccggacttggtggctggcacctgtagtcccagctactcgggaggctgaagcaggagaatggcgtgaacccgggaggcggaggttgcagtgagctgagatcacgccactgcactccagcctgggtgacagagcaagactccgtctcaaaaaaaaaaaaaaaaaaaaagtaacatcacctgatacccagtccacataaaatttctgctcctgcctcaaaaatgtccagaacgatgtatgaattttaaaactgttagaagggttcatggcttctgctcacgcagttctctgaactgaagtggggtccccaggctctagcccccgggggaggtgaggtgaggggcaggcctcccgggggctgacgtggccacccttgtccgcccgcagtggtgaccatcatcaaggggaaggtggaggaggtggagctcccagtggagaaggtggacatcatcatcagcgagtggatgggctactgcctcttctacgagtccatgctcaacaccgtgctctatgcccgggacaagtggctggtgaggccccagcgggacgggtgcagctcgcgtgggctggggtccaggtagaagacgaaaaccacgctcaatttttcccacagacgggacttactgtgggggcttagctgcaaggtgttagaaagccacagcccaagccaggtgtgacagaccctggagggagatggtgcgatgtgggggaggtcgtaggaacaggaaatccgtagcggcgcaatagcccaggtccttaggccccagcaggcctccccgggagaggtgaggtgacggagaggtggatgaagcatacggaggggcagccagggcaggtgtgcccttgctgcgtgtggaacagcagggaggcccgtgtggaaggagggtctagaacggcagcaggaggaggagtggaggtgaggggtgacagggcgtgtgcagattttgtggaggcttatgggaccccgtgcttttcctctcagagcagctagggagggtctgaggatccccagaacctccaagggccgggagctgactggggtgcccctgggtgccctctggcggccgtgtgggaaatagaccagggggcgaggggtgagtgccgctgcgacatgagggtggcccagaccagggcaggaggccacatcttggaggcaagactcagggtagtgttgccaggccccacccttcatgcctcgccctgcccctctgtaggcgcccgatggcctcatcttcccagaccgggccacgctgtatgtgacggccatcgaggaccggcagtacaaagactacaagatccactgtgagcgcggcccgggagctggcgggcggggcctcgggtgggctgctgcgggctcaccccctccctgcctgcctccccagggtgggagaacgtgtatggcttcgacatgtcttgcatcaaagatgtggccattaaggagcccctagtggatgtcgtggaccccaaacagctggtcaccaacgcctgcctcataaaggtgagggggtgggcatggccaggtgccccctgggttgaaaccaaagagaggccatcacctggccctggcatgggactttggggcccagaatgttggcctgaggtctcagagcctgatctgccagccagaggtggtgctagaggcccaggaaagacacttcgtcctttaaatatctttgtgagcgctgctgtgtgagaaccatgcttggcacttggcttctggcggaggaaacacccaaagctggcagctaaagcccacagcccatgcacggaaaggcaggaccccagggcgatgagcggatgcacatgcacgcgggccactgcagaagagcacggggccaggctgggctccgagatgtgcctgaggtcccagctactcgggaggatcacttgggcctgggagttcaaggctgcagtgagctgtgatcacatcactgcactccagctttggtgacaatgttttgttttgttttttccttttgtttttttttacttctgagaccctgtttaaaaaaaaaaaatacggcgatgagtatttgttgagctgggatgtgtgagccgggtgaagctgggtggctgaccgggggatcctgtcggggaggagtaagttgttgagtgggggaggagaggagactacaggggcagggaccccactcgggccaccctcctgagagccaggggaactggcgcagggtttaggttggcatttgtgttgccgtttgaagccatcatgttgttggacttgtcaaggggttggggagacagtggagtggggcgcctgcattctaggaggtctggacagagttagggtggcactgccaggtttgggtgttggagaggagggagcaaggaatctgggctcgaacccacatggtttattgggagccggataggcaggatgcagagtgaaggaggagccgaggctgggtgccagtgagggagggctagcaggaaggggacagcgaggtcacaggccctctgggagcttaagggagggaggaggggatgaagcgaggtggggacgcatcccggagctcgccctctcatgtcctgcaggaggtggacatctataccgtcaaggtggaagacctgaccttcacctccccgttctgcctgcaagtgaagcggaatgactacgtgcacgccctggtggcctacttcaacatcgagttcacacgctgccacaagaggaccggcttctccaccagtgaggcggggcccacagggctgggggccgttcccgagccagggcggaggcgcacccacgtagtggagggggtgacagaaacgggcagaaggaaccatggggacacgcgtgttccagtgtgagctctgccatgtagcagtcacgtggccttgggcaagtgacctgagtgtgcagtgcctcagtttcctcatccacaaaaggctgacacggtccctgtctccaaagctcaatgacagggaggtgactcgcggatagcagtcccatcagctgtcatgggggtgggcattccgacagagggaacgcaagggtggggttggggggggcagcaggccgaggccggctgacccgcccgcgcccccaggccccgagtccccgtacacgcactggaagcagacggtgttctacatggaggactacctgaccgtgaagacgggcgaggagatcttcggcaccatcggcatgcggcccaacgccaagaacaacgtgaggctccgggcagctgggtgggagggtggcagctagggcggggagtgtagattggggggggagtggtgggggaggaatggtggcagcgggggtaggggatgggggcagccggggtgggggatgggggcagctggcgggggcgagcacctctgcctattcccgggtccccaagcccctcagccccatgcctgtctacacagcaggattgcttgagcattcaccggaagttatgggcctggggacccaggctgaaaccctgccctcctggtgcttccactctagacaagggggtcagtgacatggtgatgccagttggaggtgacctctgtcaggctgggagcagggcagacaggtgttggtgtaggtgggctccagggcaagaggcagcccccagtagagtgcacggggttttctagcccagctgggaggcatgagaggagaaaggcagctttttgttttctgctcccctttctttttcctcctgagcacttggcaggagctgccatcacctgagatcagggggcttccgggggagctgggggggcttctcggagacagggtctgggcagagatccagtgtggtgggtctgagcaggcaggaggatggaaggcttggagcctggagtcgccgggagtggtctgggttggaaaagtgggtcccggccgatgggtgcgagggtgggtggcactcagggtagtcatggaatgtggaccctgggacacccacgagcctgtgacagcagcagttgtcaactgggcagttttactgccccctccgctccccgcccccccccaggacgtttgccaccgtctgtggaaacatttgtggttgtcactccggagaaggggtggtcctggcatctggtaggtaggggccagggggctggtaaatgtcctgcagccacaggaccaccccctacaaagactcatgcagcccccgggaccacggcactagctgggaaacggatactggagagggaggaggagtcctcgggcgttggtgactttgtctcatcttcatgtgctggagggtatggggggaggagaggaagtggagacagcaggctggaccattgtgtttcactggaacgtttgcctgaggaggaagtgggcttgggagaggttttcttttttatgaaagaagcaatcactgcattgctgatgggaatcatcctgatggagaaatccaagggcaagggacagcagctgggctctactcctgagtgagtctagtgggcttgggggtgtccatgtggtgctgtcccttggcagggtcagggcagctgctagggtgggaccagcagttggggtctgcagcgtggagatgggcaggaagctggagcccggctcatcgtcgcatagcctgcctgcacccgccccccgccaccacctcctggtgggttccgccctcatgccccacctctccctgcagcgggacctggacttcaccatcgacctggacttcaagggccagctgtgcgagctgtcctgctccaccgactaccggatgcgctgaggcccggctctcccgccctgcacgagcccaggggctgagcgttcctaggcggtttcggggctcccccttcctctccctccctcccgcagaagggggttttaggggcctgggctggggggatggggagggcacatcgtgactgtgtttttcataacttatgtttttatatggttgcatttacgccaataaatcctcagctggggtctggctttgtttcctgggggcaaaggaggtttggggttcctttcgcaggtactgcagtgccagcctcagcagtggggggaccggccttggcacctgctggtggctgccattctgtggatctgcgtctcccgtcccccgtctctaggcctcttgctccccttccttggttccttctcggggtccctgtcctccacagctgtctctcagggtctttgtccaactcttttcatccctctcctgggtctgcgcccctcccctctgcggtacccgtgtcctgcctagtaggggatgggggtggctttccagcacagccagccctcaagtttcccagaacagtctccccacctccccccaacactcgacattgttcctctctggctgttttttcctgttcgggtcccttcaaggcccaactgtgcccagccctctgcagctggggacactgagtgggttgggggtgtatgtttgcaaggatagaatttctcatgggggagtggccctgcttcctcccctagaatggcttggggcttagggctggggacttgccctccatggaggtcagtgggagttgcagctgtaaggtggcagggcctacccatcttacagaggtgaagacgaggtccctctgcctctgctgcagacatggcgtctgcacccacccttccaccctcagggcctggccacggggtcctgggtcccccacaatactgtgcactcgacctggttgacccaggacaccctcctcgttgaacagccctggctacacctgcttcagtgcaactggagccctcaccggcgagtgcctgacacctcggccttttctcttccggaggggcgctcctcagtgtgtttggggtctccctcgctccacgccctccagggggccgcatgtgcacttgccctgcattgcctggcccccgaggttccagggtcccaactgtctactaaccggcttcccgacagggtgagggtgaggtcgcatctacaaccagagccagcgcttccccgccgccaccccttttcttggaatcccgctgcttagctacctgcgggtgtcattggccccgccccatttccccacgctttgaagggggcgagtctccacagacctcctagggggatagacagcagctggtgtgaccccacacacccagtgaggtctctggagccgcggtgcgggaagcggggacccgggtttgaatcctgcccctctggtgtggtgcggcctcttcccacagacttttggcctcagtgttccccgcctgggaagtggggactggccctggtacctggctccagagctgcacccagaggcgatcagcccggtgcgggaacggggcggggtggccgcaactacgggccacggatcctgacccgccctgcccacgatgactatccacatcctcatcctgctgttgctcctcgccttctccgcccaaggggacctggacactgcagccaggtgagaaacccgggtggcagcagggacagggcgggagggagaccgtaaagggcgagcgccctctcccggccgcggaacgggcaggtgatctgtaagcctccccgctggtcttggagtgcttgggtgcccacctccatcacgctccatctctcaattcggtttgaacccggttttctcccacgctccctctccaggcgaggccagcaccaggtcccccagcaccgcgggcacgtctgctacctgggcgtatgccggacccaccgcctggcggagatcatatactggattcgctgtctccaccaaggagccctcggggaaggccagccacgagccccaggacccctacagctatgggcgccgccggtggcgcgaggcggaagcccggctcggttcccaggattccggcctgcagcgagggggctagcgcagtgcccagctcgctgggtgacctcgggcacggctcgtcccctcctcggcttcagtttgcctatctgtatgttggagcttctactccacatttcttctcccctaactccagcccctgaaaccgtcttccccagtccctccccgggctgcgactaggttggacctagaagcacacgggaccaggctgggcgaagaacactgacgcccagagccgaataaacaagagttccgtgtttcagtctctgcttctctgtacctatttcgacctctcagtcgaggctgggtctctaatatacctttctctattagccatgctgcttctccctcacggaagtcccactgtctaccttgaatccaacccgctgtggcgcctttcttgccaactcaatccatgcaccttccgtgggtggttttggcgggccgtcctgacccccaaacatccctcctccctccctggcgtgaaagggctgagatttgctccggcaccctacgcgcctgacgttataatgcacctggggtgggctgcgacctcccagctgagccttgttcctcgaagagacaggagactaagagacaatgagctgagtgaggagcccaggaacccgggttccgaacagctgcgtagaatgcgagcggccaaatggtggagaatctggccgggtaaaaggagacggaggactggggatcgaacggatgtaggggattggacgccgtggctcgaagggggcggggatagaacgcggggattggaaggaggcggggataaaacccgggacctgaatacccggctagggacacgagagagaggaatcggggtttctgggtgacggtgatctcggggtgggcaggactccaaaggcccgtcgacccggtggtggactccttgcactgggattggacatatgcaagcgggagatttggggccggcgctcaaaatcggggggcgggggtggactcgggtttggaccccaggatccgatcagcggacccttgattcaacgtggtaagtactggaccccaggggctcgggctccggcggggcctggagtcctgtgtctagggttgggcgtgcaagcctctccatcacttgtcctcgacgctcgcctccgctcacagcctcagcatcccaggctgcgaggcatgcgcagtgggtgcttccttccccattccctccagcacgggcggggggaggggacgctgagcggatgaatttatagacaccatccccctcgccttggcatgaaaagcggcaatggggtggacagcgtcaatgtctaacaggtgtttgtttcatatgggtctaaaactaatgcttttctcaagaccccgcaactcagcctggaccagtttccctcctccacccacccccgaatcttgagaatcctgtactggggggagggcactgcccccgcaccatgttcttgggagagcaggtaaaggggttaacgcgagctatccctctggcctctctatgcgttcccagaggtcccgaattgacgtccttccctcaaaacctccgggtctacaaaccaggaccctcaagacccttcaggtgcttagagaaggatgagctaggttatgtagtcctgggtcggcgcaaaaaggcagctgaaagcgtgagatcccgggtctgagggaggaggggctggggcctgggcttctgggtctgagggaggaggggctgggggcctggactcctggatctgagagaggaggggctggggcctgggcttctgggtctgagggaggaggggctgggggcctggactcctggatctgagagaggagggactggggcctggactcctgggtatgaaggaggaggaggggctgggggcctggactcctgagtctgagggcggaggggctggggtcctgaagtatgactctgcccgactcagggctccagcgtgacatggctgaagcgcaccaggccgtgggcttccgaccctcgctgacctcggacggggctgaagtggaactcagtgcccctgtgctgcaggagatctacctctctggcctgcgctcctggaaaaggcatctctcacgtttctgggtgaggagcggtgctggtcggtttccttccggggatccaggtttctgcttccgggatgtctgaggctcacttccggcatttcagctggttcatttctgggagactatcacccctttttcttagaattttgatgtctgctcccaggacccctttagcaatttctccgtggctcacttctgggatccacagccccacctgctgagaacctctgctcacttctttcacccaagaggggaactgggccccccaaaaactacccacttccagtttctagaactccatatccttcccttatggtgaaattatcatttcttcctttcatctccagcttcttttgtagttgttgtttctgagacacagtctcactctgtcgcccaggctggagtgcagtggcgggatctcagctcactgcaacctccgcctcctgggttcaagcaattccctgcctcagcctcccaggtagccgggattattggcgcacgccaccatgcctggcttatttatttatttatttatgagacagagtctcactctgttgcccagactggaatgcagtggggtgatcttggctcactgcaaccacctcccaggttcaagcgattctcctgcct[131 bp omitted]ccaaagcgcttgggttacaggaatgagccaccgcgcccggcccaaactcctgctctgtccctgttctggaatgcgcatgcccaatgtgtaaccagcacccatgtctgtcccagggtttctggttctagaactcttgcactgtctccatacagggactccctgcttgtcacatcctctgtgtgtgaactggggtctggaacacctgtggggtcatgattgagtttgaatcctgactccaccgcttagtagctgtgtcatcttgggcaagcacctctcttggagtcgcagtttcccctcgtggaaaacatgggtgttgacagcacctccctcacaggatagccttgaagactaaattaattcttctatgtcctggcccatggcgaggtctgagtgttagcttctgatattgttcttcattcattcaccatatatttatggggcatccggtaagggcctggccctctttagcatggagaacacagcagatatcaacagacagaatcacgcctgggcactgcgggctcacggctttaatcccagcactttgggaggctgaggcaggaggatcacttgagcccaggacttggacaccagcctggacaacatagggagaccccatctctattaaaaaaataaagacaggtcgggcacggtggctcatgcctgtaatcccaacactttgggaggctgagacggacggatcatgaggtcaggagatcgagacccttctggctaacacggtgaaaccccgtttctactaaaaatacacacacacacaaattagcctggtgtggtagtgggtgcctgtagttccaattactcaggaggctgagg[139 bp omitted]aataaataaataaataataaagacagaatcctgcttttatagagttctcattcgagttgggggagaaggcaataaaacagatgagcaaaacagaaggcaataaaacagatgagcaaaatatagggtatggtgacattctatagtgtcatctgatattgatggtgacacatgctatggtgaatgataaatc[144 bp omitted]atatagtgaaaccccatctctactaaaaatacaaaaattagccgggtgtggtggcaggcacctgtaatcacagctacctgggaggctgaggcagaagaatcacttgaatccaggaggcagagattgcagtgagccaagattgcgccactgcactccagcctgggtgacagagcaagactccgtttcaaaaaaaaaaaaaaaaaagggggtgggagccggcggccaggaggatctcctgaagctgggatgcttcagcaggctaaactgaacctctgtggtcttgttggttgtataatctgttccagttggcaaacagccactgccttgaactccgaatccctctcccgcccttaccctgggactccttgggcctcaggccagtctaccaact[131 bp omitted]tccgtctctactaaacatacaaaaaaattagctgggcgtggtggcagtcacctgtagtcccagctacttgggaggctgaggcaggagaatggcgtgaacccaggaggcggagcttgcagtgagccgagatcgtgccactgcactccagcctgggcaacaaagcgagactccgtctcaaaaaaaaacaaacatgtggccatccttttcgtgtgtttaaatacatacatacatagatacatacatatttatagacctataaatatatacatgcacacacatatatatgataacattacatggagaaaaatgcacaattttttttttttttttttttttgagacggagttttgttcttgttgcccaggctggattgcaatggcatgatcttggctcactccaatttccgcctcatgggttcaagctattctccttcctcagcttcccaagtagctgagattacaggtgcctgccaccaggcccggctaattttttgtatttttagtatagacagggtttcaccatgttggccaggatgatctcgaactcctgatctcaggtgatccacccgccttggcctctcagagtgctgggactacaggcatgatccactgcacctggcctttttttttttttttttttttgacatggagtcagtctgttgccaggctggagtgcagtggcgtgatctcgacttactgcaacctctgcctcctgggttcaagtgattctcctgcct[133 bp omitted]gcctcccaaagcactgggattacacgcataagccattgcccctggccttttttttgagacagcgtctcactctgttgctgttgcccaggctggagtgcaatagcaggatcttggctcactgcaacctccatctcctgggtttaagcaatttttctgccttagcctcctgagtagctgggattataggttcccaccaccacgcctggctaatttttgtatttttagtagagatggggttttgccatgttggccaggctggtctggaatgcctgacctcaggtgatccacccgcctaggcctcccaaagtgctgggattacaggcatgagctactgcgcccggccaaaccccagtgttttcatttgtaaaatgagatcatcttagtacttatttcacatggtttggggaggatttaaattgttaatccttgtaaatggcacctggaatgtagtaagtgctcattaaacgttagttatctctctgaggcttccaaaggagtttagttagtaacgcagtgctgttggtcgttcctcattcattccatgccctggtacttctagaaggccttactgagctccagaccctgctctgaatagggatcatttttctttttcttttcttttcttttttttttttttttttgagacagggtcttacttactttgttacccaggctggagtgcagtgtcaccatcacagctcacttcatccctgaactcctgggctcaagcgatcctcctgcttcagccttccaagtagctgggactaaggtgtgtgccactgcgcctaatttttttttctttctttttttttttttggagaccttgtcttgctctgtcacccaggctggagtgcagtagcgtgatcttggatcactgcaacctcagcctcccgggctccagcgattctcgtgcctcagtctcccaagtagttgggattacaggtgcctgccaccatgcccggctaatttttgtatttttactagagacggatttcaccatgttggccaggccagtcttgaactcctggcctcaagtgatccgcctgcctcagcctcccaaagtgttgggattacaggcgtgagccaccgctggtcttgaactcctgggctcaagggattctcctccttgacctcccaaagtgctgagtttacaggagtgagccaccacatccggactgttctgcctttgacagcctccccttccaggtcctgcctcagaatatcctcctccagggagccctccctgatgccctcgaactgtaacttggcagcacagggctcctcctatttcttgccctatagcaattaatacttacttcattctggtctgacctcgctgagggcaggacctggatctctctgttccctactagatcttgagcctccagctcagggctccgcactgggtgctcagtaatgtctggggatggcacagaacaggggctcagaggagagggcagatgattcaatggatgccctttcctccccacagaatgactttctcaccggtgtgtttcctgccagccccctcagttggcttttcctcttcagtgccatccagcttgcctggttcctccagctggatccttccttaggactgatggagaagatcaaagagttgctgcctgactggtgaggtccccccactccagcccagtaacccccaatcactctcccttcacccagtaagttcctctgtcattgtggtgtacctgctaaagaaaagtaacctctgagacttacattgggtcagattaataaaggcatggcatgaagaaaaaggaggtgaggccgggcacagtggctcacccctgtaatcccagcacattgggcattgggaggctgaggtgggtgtatcgcttgaggtcaggagttcgagaccagcctggccaacatggtgaaaccttgtctctactaaaaatacaaaaattaggccaggcatggtggctcatgcctgtaatcccagcactttggaaggctgaggcacgtggatcaactgagatcaggagttcaagaccagcctggccaacagggtgaaaccctgtctctactaaaaatacaaaaaattagctgggcgtggtggcaggagcctgtaattccagctactagggaggctgaggcaggagaatcgcttgaacccgggaggtggaggttgcagtgagccgagattgcgccattgcactccagcttgggtgacaagagcgaaactccatctcaaaaaaaaaaaaaaaaaaaaaaggtgtgagctttgctgggcacagtggctcatgcctgtaatcccagcacttttggaggccaaggcaggaggatcacttgagcccaggagtttgagaccaacctaagcaacatggtgaaaccccgtctctactaaaaataacaaaaaattagccaagtgtggtgtcacttacctgtggtcccagctacccaggaggctgaggtggagatcacctgagctcaggaggtcgaggctgcagtgagctgagatcatgccactgcattgcagcctgggcaacagagt[212 bp omitted]aaggcaggataatcacttgaacccggga[136 bp omitted]cgttgttgattgtcaaggccttcatctgtaaaatgaggtatgaataattgcttcttagtgtgcttggaagaattaatcaaaatcctgcctgtcggcgggatgtggtgactcacacctgtaatcccagcactttgggaggctgaggcgggtggatcacctgaggtcaggagcttgagaccagtctggccaacatggtgaaactctgtctctactaaaaatacaaaaattagccgagtgtggtggcaggtgcttgtaatcccagctacttgggaggctgaggcaggagaattgtttgaacctgggaggcggagcttgcagtgaggcgagatcacgccactgcactccagcctgggcgacagagagagactccgtctcaattaaaagaaaaaaaaatcatgcctgtcatatagtcagtagagtgccaggaggtcctcatgggagtggctgcattatttttattgagttattgtgatcttcaggaagggtctgaaaactgggtgcaggtgagatgtcaggtctagttctcggatgagtcctcccggggaggaaggtccacattttgtgcagatggccccaaagaacagacccaggatcagatgtagacaattccaagacggaggccgggcacagtggctcacacttgtaatcccagcacttcggagggctgaggcaggaggcttgagctcaggagttggagaccagcctgggcaacatagagacccctgtctctaaaaaaaaaaaaaaaaaaaaaaaaaaaaaaaaaattcctggaacgctagatttacccccagtctacagagggaaagtgatttgacccaagtcctccaggtgacatttgcaaactttgcaaacaaacatgttgatttaatgtagctttagaccagcttttcctaaatttaagcttgtattggaatcacctggatgggttgttaaaccgctgactatggccaggtgctgtggctcacacctgttatcccagcactttgggaggcccaagtgggtggatcacctaaggtcaggagttcgagagccgcctggccaatgtggtgaaaccctctctactaaaaatgcaaaaaattagctgggcgtggtggcgggcgcctgcagtcccagctactcgggaggctgaggtaggagaattgcttgaacccaggagatggaggttgcagtgagccgagatagtgccactgcactccag[134 bp omitted]acacggtgaaacctcatctctactaaaaataacaacaaatagccgggcgtggtggtgggcacctgtattcccagctactccggaggctgaggcaggagaa[131 bp omitted]caccctgagagattctggcttgttaggtcttaaaggcgcccaggaatatgcatttcgaacaagctcccaggcagtgctcccaggagccacagtttcagaactattgccttagagtagtgatagctggaaggaaaaagtgtcccctcaatagaaataatggctgtcatttattaaacacctaccaacttccatggaaagtgactttggaagcttggtgctgccacaatgggagggggctggagggggtgacagagctcacacctactaaaatgacaaaaatgggtttctctgtctgacagccaaaagatcagcgcaggggctggagggggctggaagggagggaggttctgaggccaggagacccaggcccagcctctgtttctctccccgcaggggtggacaacaccacgggctccggggggtcctggcagccgcgctgtttgcctcgtgtttgtggggagccctgatcttcacactgcacgtggccctgaggctgcttctgtcctaccacggctggcttcttgagccccacggagccatgtcctcccccaccaagacctggctggtatgggaggggcatagccctgctcaggctctcctgggacccgcttatctattcccctctctctgggtctctgtccccctctctctgggtctctgtccctctctctctgggtctcttccccctctctttctgggtctctgtcctcctctgtccctgggtctctgtccccctctctctgggtctctgtccccctctctctctgtgtctccgtccccccctctgggtctctacccccgactctctctgggtctctgcccccctctctctctgggtctctgtccccctctctctgggtctctgtcccctgtctctgggtctctgttcctttctctcttggggtctccgatgctcttaagtctctgtgtccttctctttgggtttctgtcccactgtcgacccctgccccgtcaactccctggctccggtgaggggttaatgacccggtaactcctcctccccaggccctggtccgcatcttctctggccgccacccgatgctgttcagttaccagcgctccctgccacgccagcccgtgccctctgtgcaggacaccgtgcgcaaggtgggcctgggagcgcgcagacgggctggggcggccggggcgggccgggggcgtgacctgccctcttctcccctttagtacctggagtcggtccggcccatcctctccgacgaggacttcgactggaccgcggtcctggcgcaggaattcctgaggctgcaggcgtcgctgctgcagtggtacctgcggctcaagtcctggtgggcgtccaattatgtgagtcccgccaccgccaccaacgccccacctgaagggctaaggttgtgagctcgcctgctaaacttgcgagttatacgccctgccccacgacacgcccacaacccacacgcccccagcccccaagggtcaataccctgagccccgctcacatacatctatatcctaacctccacatttatatatatataaaaatatatatgtatatatatttatttatatataaatatatagtgtatatataaatatatatatttatttataaatatatatatttatatttatatacaaatattaatatttataaatttatatataaatatatttatatataaatttataaataaatatataaatattataaatatattaaatatatttatttataaattataaatatatatttatttataaattataaatatatatttatttataaattataaatatatatttatttataaattataaatatatatttatttatttataaattataaataaatatatatttatttataaattataaataaatatatatttatttatatataggcttatatatttatttatatatatatgctcataacatatatatgctctctctatatatttaatgttgaagtttggggtatagatgctccagtattctgagcttcacccttgatcttccaaagtttgaaccagaattccaggacttagccctggtgcaatgtctcacgcctgtaatgccagcaggttgcgaggcca[134 bp omitted]ctgaggcgggaggattgcttgaacccaggaggcagaggtggcactgaactgagatcgcgccactgcacttcggcctgggccacagagcaagactctgtctcaaaaaaaaaaaaagaaaagaaaaaaaaaaagacaaaaccaaaggagttgaatggtgaggagtggtgggagaggcctgaactccagactgaggatcctggactctttcctgggggtactagggagccatgggagggtttggagcagggaaggggcagggtcagctttggtgtgggggaaagactggagggcgggaggctgcagaggaagctaccgtgagacctaccattgtaggtcattgagacactgggctgggatgagaaaagctgcagcaagagtgagaggggaagggaagagggtccccggcagagccccacgaggcagctatgtggaagcctcagttggtcaaacccagcgaaggggacgaaatatctggagaagtaaaagggaatgcaggccttgcttttctggttaaatatttttttcttcacacttttggacaagattctgtttacacacacacacacacacacacacacacactcatttctttcttcccttccttccctccctccctccctcctttcctaccttctttcctgcctgcctgcctgccttctctctctctttccttcctttttttctgtctccttccttcctttttttctttgagatggagtctcactctgtcgcccaggctgtagtgcactggcaccgtctcagctcactgcaagctctacctcccaggttcacgccattctcctgcctcagcctcccatacctggctaatttctttttttttttttttgtatttttgtatttttagtagagatggggtttcaccgtgttagccaggatggtctcgacctcctgacctcgtgatccgcctgcctcggcctcccaaagtgttgggatttacaggcgtgagccaccatgcccggcctctttctttctttctttctctatctttctctctctccccctccctccctttctgtctctctctcctccctccctccctccctccctccctccctcccttccttccttccttccttccttctctctttctctctctttcctttttctttcttggaaggggtctcactctgtcacccaggctgtagtgcagtggcgtgatcaaagctcactgcagccttgacctcccagactcaagccatcctcccatctcagcctcctgagtagctgggactacaggcatgtgcccctaagcctggctaatttttaaattttttgtagacatggggtcttgctatgttgcacagactggtctcaaactccgaggctcaagctatcctcccacctcagcctcccaaaatgctgagataagaggtgtgagccactgcgcccagcctgtatattttattgtacctccaagccaactgccagtgacacacgcaccatttttttatgtacaacaacaacaacaaaaaaccctacaagagcagctaaaccgtgacacagtgctttcttttgtgtttttcattgtttgaattttatcatggtattggcaaggccacaattttcatgtatttacacatatgtatattatttcacatatttattgttttataaattttacatttatgttctgtttttcttttttgggggggacggagtttcactcttgttgcccaggctggagtgcaatggtgcgatctcagctccttgcaacctctgcctccccgactcaagcgattctcctgcctcaggctaccgagtagccgggattacaggcgtgcaccaccacgtgtggctaatgtttgtatttttagtagagacagggtttcatcatgttggccaggctggtcttgaacacctgacctcaggtgatccacccgcttagcctcccaaagtgctgggattacaggcgggagccaccgtgcccagctgtaccttgttatttccaccagctatgtaatattccactgccggagtataacagggtttagctaactgatcccccatggatggatttctaggtgatcgctagttactgactacgatggctgacttctttggctctatcctccctgcctgacgcaggagcatctggggccttccctgtcctactgtccctcccccaacaggccccagcccctcactgtgtgtctccccaccccgctcccaggtcagtgactggtgggaggaatttgtgtacctgcgctcccgaaatccgctgatggtgaacagcaactattacatgatggtgagaaggggaggggtgaggttcataggccccaggtctagggttggggggtacctgggcggaatgtgacggtcatgctcagtgacctggatctagacgcgccatctgggattcatcattccaccctcttttggggtcaggacctgtatttgggtcagtggctccatcgggggcaaacctgaccctgggtgttttgccatcccctctcctggtccccaggacttcctgtatgtcacacccacgcctctgcaggcagctcgcgctgggaatgccgtccatgccctcctcctgtaccgccaccgcctgaaccgccaggagatacccccggtgagagggccccagtgggttagggatggaggtgtggtcctgtggcctttgggccacgtgggtcctggaaggcagctcacagcccacggtttcctgcagactttgctgatgggaatgcgccccttatgctctgcccagtacgagaagatcttcaacaccacgcggattccaggggtccaaaaaggtgagaccctctcctgtccccactgatggaggcagaacaatatagtggctaagagcatgttttctggagtccgcctgactgagctgggaaccattgcttccttgctgtgtgaccttctgcacgttattaccctctctgagcctcagcttccactaaagtgggataataattgtacctaggggctgggcgcagtgactgatgcctgtaatcccagcactttgtggggccgaggtggacaattgcttaggccaggagttcgagaccagcctagggcaacgtagtgagatccggtctatatacaaaatttaaaaattagccaggcatggtgatatgcacctgtggccccagttaatcgggagcctgaagtggaaggatcacctgagccccggaggttgaggctgcagtgagctgagatctcaccactgcactccagcctggcgacagagcgagaccttgtctccaaatactaagtaaataaaagtcctagggtgctgatgattactagggtactttgaacaactgacgacacctaagaagtatataataaatggtcactatttttatgtgtctggccttcctgcccccatgcttctgccaacgccacccctagactacatccgccacctccatgacagccaacacgtggctgtcttccaccggggccgattcttccgcatggggacccactcccgaaacagcctgctttccccgagagccctggagcagcagtttcagagaatcctggatgatccctcaccggcctgcccccacgaggaacatctggcagctctgacagctgctcccaggtaagggtcaggggtcaggggtcaggggctctcagaggccgccagtgtcctgagactgtggaagggcagggtggggccaggtggcggctgggcaggatggactcaggcacatcccgggccctccaggggcacgtgggcccaggtgcggacatccctgaagacccaggcagcggaggccctggaggcggtggaaggggccgctttctttgtgtcactggatgctgagcccgcggggctcaccagggaggacccggcagcgtcgttggatgcctacgcccatgctctgctggccggccggggccatgatcggtgagtgagtcttgggatggggcccccagatgtggcacccgagaatccagtatcagacctaggacccctgacagtagacagccagaccctggagcccacacctgcagagtctgtagaccaggggctgcatagagctgaggaccccagacccagtgctttgggacctggagacctctgacctggggaacccctcaacctgggacccaagacctataaaccagacccagtgacccccaaatctgagactcccaaacccctgagctggaccctccgacccagagaactcagcatcacagacccagagaccccagatctgaggaccaccaaacccaggacccctaggcccagggaccccagacttggcaacctcagcctcagaacttgaaccattcaatcctcaggccttaatgcaggcaccccaaatccatggccctagacccagacttccagacctagagattctcaggcctggcaggcatcactgaattcctaggccccaggggggtcccgctgacctcccagcacccccaaaagccttgaaccttcctcggcaagtttcctaaaaatctccaaactccagactgggcatggtggctcatgcctgtagtctcagcactttgggaggctgagaggggcggatcacctgagatcaggagtttgagaccagcctggccaatatggtgaaacctcatctccactaaaaatgcaaaaattagctgggcatggtggtgcatgcttgtgatcccagctacttgggaggctgaggcggga[133 bp omitted]aaactctaaatcccagacatgtcttggagacctccagggccactactggggacccccaatggtcctagagatccccataccagcaccccaatggattcccacatcttcccatctagaaaaccccctcaagtcccacagaaagcactctgaggtccccgtgcccctcgctcttggtgacccatctgaactctccctgacagctggtttgacaaatccttcaccctaatcgtcttctctaacgggaagctgggcctcagcgtggagcactcctgggccgactgccccatctcaggacacatgtgggaggtagggcggccagccctccctggttctggggacccctgccccatctccaaagaccgtcctctccagcgccttagtgtcagaagaaaaactgaggcttggccgggcacggtggttcatgcctgtaatcccagcattttgggaggccgaggtgggcggatcatgaggtcaggagttcgagaccagcctggccaacatagtgaaaccctgcctctactaaaaatacaaaaaaattagccaggcatggtggtgtgtgcctgtaatccctgctactcgggaggctgaggcatgagaatcgcatgaacccgggaggtggaggttgcagtgagctgacattgtgccactgtacttcagcctgggcgacagagcaagaatacatctcaaaaaaaaaaaaaaaaaaaaaaaaagaaaagaaaaactgaggctcagggagaggcagaggctggcccagggtcacctggcaaagaaaggggactgggatgaggaccttcctttgatgagttggtaactggggctcaaagaagggaagtgattttcccagagtcacacagcgaggagttacagagcaagaagatgactccaggctgggtgcagtggctcatgcctgtaatcccagcactttgggaggtcaaggcaggaagatcaattgagcccaggagtttgagactagcctgggcaacataatgagaacctgtctacaaaaaacgttaaaaaaaaacaaaaaaaacaaaaccagccagtcatggtggtacatgcctgtggccccagctactccggaggctaaggcaggaggatggcttgagcccaggagtttgaggctgcagtgagttataatttcaccactgcacaccagcctggatgacagagcaagaccctgtcaaaaaaggaaaagaaaataaggacagtaaacaccagttgagtattggtgttagtcctgttcttgatgaacatgaacctgagaccgcatctgtgaatatcagaggtttctgtttctcagggactgccccctacccgaaaaagggctgcatgaaaagaggtcccgggttagatggcctcagtccacagggaggaagggactctaacagcctctgtttgcccacagttcactctggctacagaatgctttcagctgggctactcaacagacggccactgcaaggggcacccggaccccacactaccccagccccagcggctgcaatgggaccttccagaccaggtgaggctgggtttctgggcctctcctccaagtcccaagattcctagccttgacttcaaactcatccccacccctaatctgaacgtgaaaatcaaccccattcctacccccaacccgaaacccatgcttcccccacccccaaatcaggccatatgcatccacaacctcaaaccccaacacgaacctcatctccagccccaactccaaccgtcctcccactgccaatcccatcctcaaccccaaccccatctctacctgtttcagactcaaaaaccaccactgtccaaccccagcaccaacccctactccattttccttccaaatccatctccatacccaatcccatcccaacaccacctgaattcattcccatgttcatcctaactccaccccataccaaaccctaaccccatacccaaccccaaccccatcctgtactcagccacgaccccacttccaatgacaacccatgcccaactcatcccatacccaacctcaaccccataccccacaccaaccccatcccgtactcagccacaaccccacctccaaccacaacccatgcccaactcgaattcacttcccatacccaaccccttccccgttctattcccaaaccactctcagtccctcctccatccccatccccaaccccagcttcaactgtggcccaaccccaatcttgttccagtctacacatgccatccctatccccatttttttttttttttttgagatggagtcccgctctgtcacccaggctggagtgcaatgacacgatctcagttcactgcaacctccatctcccaggttcaagcgattctcttgcctcagcctcctgaggagctgggattacaggtgcccactaccacacccggctaaatttttttatttttaatagagatgaggtttttccatgttggccaggctggtctcaaactcctgacctcaggtgatccagccacctcagtctcccaaagtgttgggattacaggcgtgagccaccgcgcccggcattttttttttgagacggagtcttgctctgtacccaggctggagtgcagtggtgcgatctcagctcactgcaacctctgcctcctgggttcaagcgattctcctgcctcagcctcccaagtagctgggactacaggcacgtgccaccacggccagctagttttttgtatttttagtagagacgaggt[139 bp omitted]tcttctcttctttgtccccatttccatattctgccgcaaccttaactccacatccacctccgcttccagccttattcctggctttcaccctacccccatctgtaaccccaactactcctcttccctcctcctctggcagatccactcctccatctctctagccctgaggggagccaagatcttgtctgaaaatgtcgactgccatgtcgttccattctccctatttggcaagagcttcatccgacgctgccacctctcttcagacagcttcatccagatcgccttgcaactggcccacttccgggtcagttgggttccccatccacagcccccgcagggtctcagtccacctgagcccccaagacctgcccctccacggttccttgtggtcgctgccattgtgggtcggccatcttgaattctctcttccaaccattcttgggctggctggaggaggctggaggtctggacagagataggtcaagtctgtaagatctcctgagcccagctgacagactcctcttctcctccctgtcccccaggacaggggtcaattctgcctgacttatgagtcggccatgactcgcttattcctggaaggccggacggagacggtgcggtcttgcacgagggaggcctgcaactttgtcagggccatggaggacaaagagaagacggtgggtgcagccctcgcttgaggcttcagttatttctgtgtactcactcatccacttgcaaacgttgatgggacctactgaagccagcctccacgaggagcacaagggacaagggatgaatcggacctggcctctgacttcaaagagctcactgatggggggagacagcccagcatagtgtgatatctgctttcatggtggtctcacagggcactgggggtgcacccaagaaggaaccccatttctttttttttgagatggagtcttgctctgttgcccaggctggagtgcagtggcacaatctcggcttactgcaacctctgcctctcaggttcaagcgattctcatgcctcagcctcctga[224 bp omitted]ctctttgtgacttgtgaccttcctttgcacccctgtaccctctctgcccagatcccacctgccctgcacctcttctcccttgccctacacctagccccgcacctacaaggtattgtggttccatggaaggagtttggactctggggccagacacacctaggaacccgcctggctctccctggctgtgtgaacctggccaaatgatttcccctctctaagcctcagttccccatctgtaaaatggggttgatattcccaccttgcagggatgtggcaaactcagttgaggccagatgtgccgcaggcccagccctaagtcgacttcctgtctttccatgacctgtgacctccctggggactgcaggacccacagtgcctcgccctgttccgcgtggcagtggacaagcaccaggctctgctgaaggcagccatgagcgggcagggagttgaccgccacctgtttgcgctgtacatcgtgtcccgattcctccacctgcagtcgcccttcctgacccaggttggggcacagggaaagggttagagagggaagtgggagaccatggaagaagggagaggtttcagggaaggagggtgatgttgaaaaaggacccatcaaggccgggcacggtggctcacgcctgtaatcccagcagtttgggaagccgaggcaggcggatcacttgaggtcaagagttcgagaccagcctggccaacttggcgaaaccctgtctctactaaaaatacaaaaattagctgggtatggtgacaggcacctgtaatcccagctacttgggagggctgaggcaatagaatcccttgaacccgggaggcggaggctgtagtgagctgagatcgcaccactgcactccagcctggacgacagagcaagactctgtctcaaaaaaaaaaaaaaaaggagggtgatgttgagaaaggatgcgtcagcagagaagtcagttgtgggggggcggcaaggcagaaggcggagaggcaacgggacaacgggagcagacaaaaggggagagggtcagtggggtggggataagaggaaagggcgtggtcagaggaggggcgtggtccgagggagaagaggagagggacgtgggtgtgggtggtgagacgagtgaggggcgtggccagatagggcgtggtcaggagaagggcgtggttagggagaaggaggcccggatttacgggtaaaaaaaaagccagggatgcagggagtgaagtggagccaagggccggaactgcagatctctgtcctgcacatgtgatgggctcctgtcctcaggtccattcggagcagtggcagctgtccaccagccagatccctgttcagcaaatgcatctgtttgacgtccacaattacccggactatgtttcctcaggcggtggattcgggcctgtgagtggagctgggcgcgctggcccccagaggaaagagggggctggggggcctgcactcctgcatagtgggggtggaggggaccggagctattttcttcccttcactctttccgtctccaggctgatgaccatggttatggtgtttcttatatcttcatgggggatggcatgatcaccttccacatctccagcaaaaaatcaagcacaaaaacggtgagacaaacgtgtatacccaccaactccctctttcctcaggaaccaggagtctgggcccccagcccctcctccctcagacccaggattccaggccccagcccctcctccctcagacccaggagtccaggcccccagcccctcctccctcagacccgggagtccaggcccccagcccctcctccctcagacccgggagtccaggcccccagcccctcctccctcagactcgggagtccaggccccagctcctcctccctcagactcaggaatccaggcccttagccctcttgtttctcagcctccaggatcccatctcccagcttcccctggctctgacctgttctccttccaggattcccacaggctggggcagcacattgaggacgcactgctggatgtggcctccctgttccaggcgggacagcattttaagcgccggttcagagggtcagggaaggagaactccaggcacaggtgtggatttctctcccgccagactggggcctccaaggcctcaatgacatccaccgacttctgactccttccagcaggcagctggcctctccaaggaataagggtgaaattgccacagctggctgacacaggacaggggcaactggtttggcaaccccacatccaggccaataaagatgtgtgagctgggtgtgtggtgtctgctatgctcttgggcagggcaggggtagaagaggtaaggaccagggtggaggaggacagaagctcccatccattcccaggcccagccagggattcccagttgcagtcacagcttcaaccacagcccgcaacacctgcccagtgtacttcatttccagcttcactcataccaaacccaaccctccaaggccagtgccaatcaaacacaacctcacaagttctcctgagcctaattcctgctgccccaacaccactgtccacctcaaatccatctccaggccgggcgcggtggctcatgtctgtaatcccagaactttgggaggccaaggtgggcggatcatgaggtcaggagatcaagaccttcctggcgaacactgtgaaaccccgtctctattaaaaatacaaaaaaattagccgggcatggtggcgagcacctgtagtcccagctactcgggaggctgaggcaggagaatggcatgaacccgggaggcggagcttgcagtgagaagaaatcgtgccattgcaccccagcctgggggacacagcaagactctgtctcaaaaaaaaaaaaaaaatccatctccaaacctaaagatccagccaccccaattgacaatccccaaacgaacccacgaaaatttttattacccaaccccaactccagccatttctttttctttttctttttttgagagagagtcttgttctgtcacccaggctggagtgcagtggtgcaatcttggctcactgcaatctctgcctcctgggttcaagcaattctcctgcctcagcctcccgagtagctgggactacaggcatccgccaccatgaccggctaatttttttttgtatttttagtggagacgggttttggggtttcatcatgttggtcaggctggtctcgaactcctgacctcaaatgatccacccaccttggcctcccaaagtgctgggattatgggcatgagccactgtgcctggcctactccagccatttcaacctcttcctcaatgacggattcagctcccataactaggaaatgcactgcccagtgcacaccaccctaacgctgccatcattccagcaatcagcaactccatgatgccacaccccactatacacaacaactcaactacagttcgaaccacacaaccaacacaacgtccaactccaagctccaccatccccaccaaatatcccttctcatttccaccataacccacactttaccttgacccatagtgatgactttatttttatttatttatttatttatattttaagacggagtcttgctccgtcgcccaggctggagtgcagcggcgtgatctcagctcactgcaagctctgccttccgggttcatgccattctcctacctcagcctcccgagtagctgggactacaggtgcccgccaccacgcc[182 bp omitted]tgtgctccaccacccccaccattacaatctccaccagcccaactacagccatcaacaccaaacccaatcacccaccccaccaataccacggttccaacgcgccatcaatctaaccctcactgcttctgagtcaaacaataatacaacccaacaacaaaatcaaaattctaaatggctcaacctctaccagcccaaccaccccagccagactgccaactctgtgatggtttaaaaaatgtccacaagtgggggctgggcacggtggctcatgcctgtaattccagcactttgggaggcggaggcgggtggatcacctgaggtcaggagtttgagatcagtctgaccaacatggagaaaccacatctctactaaaaatacaaaattagctgggcatggtggtgcatgcctgtaatcccagctactcaggaggctgaggcaggagaactgcttgaacccgggaggcagaggttgtggtgagccgggatcgcgccattgcactccagcctgggcaacaagagtgaaaccccgtctcaaaaaaaaaaaaaaaatagtgattaggtcacaaaagacattgtggctttcttttggccgggcatggtggctcacacctgtaatcccagcactttaggaggctgaggcgagctgatcacgaagtcaagagatcgagaccatcctgaccaacatggtgaaaccctgtatctactaaaaatgcaaaaattagctgggtgtggtggcatgtgcctgtagtcccagctactcaggaggctgaggcaggagaatcgcttgaacccgggatgcggaggttgcagtgagctgagattgcaccagtgcattccagcctggcaacagaacaaggctgtgtctcaaaacaaaacaaaaaacaaaacaaaacaacacaagacattgtggcttccttcttgctctgtttctcaatcacttgctctgggggaagccagccaccatgtcatgaggacactcaagctgcccatgaagaggcccacgtggtaaagaactgagacctcctgccaacagccagtgaggcacacatgagtgagccatcttggaagcagatcctccagtcccagtcaagccttcagatgactgtcacccggctgacagcttaaccacaacttcatgagggacacggagccagaaccaccttagctaagctacttttgatttcctgacttttaacaactatgtgagataataaatgtttgttaattcaagttgctatactttggggtaacttttttttttacacaggaataaagaatacaaactgcaaacacctcagcctcaaccctcatattcttttttgaaatttgcttttatttttatttatttttttgagacggagttttgttctcgttgcccaggctggagtgcaattgcacagtctcggctcaccacaagctccacctaccccggttcaagagattttcctgcctcagcctctcaagttagctaggattacaggcaggcaccaccatgcccggttaattttgtatttttagtagagacggggt[136 bp omitted]aggctggagtgcagtggtgcaatctcggctcactgcaacctcctcttcccaggcccaaatgattcttgtgcctcagtctcccgagtagctgggattacaggcgtgagccactgcacctgaccaagaaatttatttttggttggaatactgcctggcgcaatctcggctcactgcaagctccgcctcccgggttcacgccattctcctgcctc[225 bp omitted]ggtcctcaggggtacagaattggattaatcataattgctggtccttggcacatactattattatgtgtaccacttcttaagctattatctcttggcttcaaatctatttcccagcactgggctttgggtaactgggaatgggactctgaaaaccccactttcactttgccaagtggtgtgttagcctctgccaatagggggtgccagactgaccgtagagcctgaaggaggaaaagggttcttgctccttcctgtttgctctctgcttacttcccgttggtttcctgttctcatctgcgtcagcaaagcttcttcaccctgtccaaggcagttctttcctgtagcagcagctaaatccaatttgcagtttttccaaacttgcacatcctcagagatgccagaccatttggggatgccagaccagcacccctgcctgagaaaattccagtctcgggccgggtgcggtagctcacgcctgtaattccagctctttgggaggctgaggcgggtcaatcacgaggtcagaagatcgaggccatcctggctaacacggtgaaatcctgtccctactaaaaatacaaaaaataagccgggcatagtggcgggcacctgtagtcccagctactcgggaggctgaggcagggcaatggcatgaacccgggaggctgagcttgtaatgagccaagatcacgccactgcactctagactgggtgacagagcgagactccgtctcaaaaaaaaaaaaaaaagaaagaaaattccagtctctagtgatcctcctctgagctcagaaacaccagcaccatctgagcagtgcctcctcttcagagcctcagtttttttttttttttgagacagagtctcactctgtagcccaggctggagtgcaatggcgtgatcttggctcactgcaaactccatctcgcgggttcaagtgattctcttgcctcagcctcccgagtaatggattgcagacgtgcgtaaccacgcccagctaatttttgtatttttagtagagacaggttttccccgtgttggccatgctggtcttgaactcccaacctcaggtgatccacccgccttggcctcccaaagtgctggaattacaggcgtgagccactgggcccagcccagaggctcagttttatgtccactggctcctgatccaaatgtatagtttttaataactctaacctttgtctttgtttttcataccctagtgagataggaatttggcaagactggtttccaagacaacaggacacaagacctcactcataagacagaaaacagcaaaagaaactggctaaaaccagctagaaccaagaggacaatgaaagggacctctggggccgggcccggtgcctcatgcctgtaatccctgcacctagggaggccgaggcgggtgaattacctgaggtcaggagttcgagaccagcctgaccaacacggagaaaccctgtctctactcaaaatacaaaattagcccggcgtggtggtgcctgcctgtaatcccagctacctgggaggctgaggcaggagaatttcttgaacccgggaggcagaggttgtggtgagccaagatcgcgccattgcactccagcctgggcaacaagagccaaactccatctcaaaaaacaacaacaactaaaaaggaagtgacgtctggttactttcactgctcattatatgctaattgtaatgcattaacatgctaaaaacactgccaccagcaccatgacagtttacaaatgccatggccatgctgaaaagttaccctgtgtggtctggacggggtgaaagcccaggttctgggaactccctgcctcttatctagaaaacccatgtgtaattcaccttttatttagcatatattcaacaactaaccattaaaataaccaaccaacgatcctcagagctactctgcctatgaggttgctactcttactttcctttctttctttttttttccaattgtaaagtgctgatcctgtttatttggcaggaaaacgagacaatccagcagcccaggagggacaggtggacttaatcctcctcctcgtcgtctccagccccaccctcaccctggcccttcttggcgttcttcctcttcacgcggccggggcggccaccccatagggagagcgcagagacaagtcgatgcgcttctgggaatccaggcggacaatgaaggacgggatgttcgccacctgattgcggaccctgacacggcgctggcggatcagtacgccagcgtggtggatggacttggccaagcccagcttgaagacctgggtctgtaggcgtctctctaagaaatcctctatcttcaggcccaggatgtaatccagcttcgtcttgccctcatccagcaccccaatgcggagcagccgccgcagcaggacgttgccttcaaacagacgccgtgggtccttctcatcaagcgtcagcagttcccgggcggccttgcggatgttggccaaggtaaatttgaccctctagacctcacgtttgttccggaacccatactcgccgatcagcttcagctcttggtcgagacgagatttctcgaagggtctccgcggggtcacataagttttgtgacaaacccagctccgggccactggcatgttggctccgcttccccgtctgcgcctgagtgcaggacccgttcactgagaaagagctcctttctttttcttttcttttttccttttcttttttttttttttttcttttttctttttttttttttttgagacagtctcgctctgtcgcccaggctggaatgcactggcgcgatctcggctcactgcaacctccgcctcccgggttcaagcgattctcctgtctcagcctcccaagtagctgggactacaggcgcccaccat[174 bp omitted]acctgtctcaggccttttctcgtattttacttttctgctcttagtgccaaaatgcatgcttatgacgcttatttcactgttggactggtagcatttcttctggctatttgagcaatttttgctattctgtatcaggtagggcactttccttgttttgaattctttattttggagaggaacccctttgttctgactctgggatgccggagtcacattgttccatagcctcagttgtgcctttggggttcactgttggccaccctcaggatgctccagggttttcggcatttggtgtggggacccttggtgactgatatctggaggccccaggtcttttggtatttggtgccctggattcaggttgcgtggttgtactggtagccagactcaaatttgttttttttgttgtacggagtctcactctgtcgcccaggctggagtgcagtggtgcaatggctcactgaaacttccgcctcccaatttcaagcgattctcctgcctcagtctcccaagtagttgggactacaggcctgcaccaccacacccagctaattttttttttatttttatttttatttttttttttttttgagacggagtcttgctctgtcacccaggctggagtgcagtggcgggatctcggctcactgcaagctccgcctcccgggttcacgccattctcctgcctc[224 bp omitted]ggccaggctggtcttgaactcctgacctcgtgatctacctgccttggcctcccaaagtgctgggattacaggtgtgagccaccgtgcccagcctgtttgagaccgagtttcactctgtcgcccaggctggagtgcagtggtgcaatctcggctcactgcaacctcctcttcccaagcccaaatgattcttgtgcctcagtctcccgagtagctgggattacaggcgtgagccactgcacctggccagaaatttatttttggttggaatactgcctaggtcattacaaactggaaaaccagaaattttagcctaaaaatagttctttgcggccaggtgtggcggtcatacctgtaattccagcagtttgggaggccgaggtgggtggatcacaaagttaggagtttgagaccagcctggacagcatagtaaaaccccgtctctactaaaaatacaaaaaattagcttagtatggtgtcatgcctttagtcccagctacttgggaggctgaggcaggagaattgcttgagcccaggaggcagaggttgcagtgagctgagatcatgttactgcactccagctgggtgatagagactgtctcaaaaaatatcaatcaatcgataaaatagaggacgtgcgcctctttctgagtctgatttggctttatgtaaggataagtttggccagtttttggagaatccagtaatttattgaagagtttgttaagttggccatgtcctgtgacctgacttggcatgactaatggatattattgtctacctgctctacagtagaggaaaaacagaggattctaggcactccccatgaaaccacaaatggaatggccacttgcaatcaaagccatgccatttattgggaggagggaatgcaaccccagattggcccctgatctggttttggctgtgtccctgcccaaatctcatattgaattgtagctcccataattcccccatgtcgtgggaggaacccagtgggagatacttgaatcatgggggaagtttcccccatactgttccggtagtgaataagtctcatgagatcagatggttttataaggagtttccgcttgtgcttggctctcattctctcttgcctgccaccatgtaagacgtgccttttgcattctgccatgattgtgaggcctccccagctatgtggaactgtaagtctattaaacctctttttcatccttttttttttttttttttttttgagacagtcttgctctgtcgcccaggctggagtgcagtggcacaatctcggctcactgcatcctccacctcctgggtttaagcagttctcctgcctcagcctcccaagtagctgagattacaggtgcctgacaccactcccggctaacttttaaatttttagtagagatggggtttcaccatgttgaccaggctggtctcaaactgctgaactctagtgatccgcctgccttggcctcccaaagtgctgggattacgggcatgagccactgtccctggccagtaacaaagttttagaagtacagagtgttagggccaggtgtggtggctcacgcctataatcctagcattttgggaggctgaagtgggtggatcacctcaggtcaggacttggagcattttgggaggctgaagtgggtggatcacctcaggtcaggacttggaagaagagctgaggcagggcttgcttgtctgacataatgtaaaagagtctggaacatgtcctgggtccagggtctcaaacccctcgtggcctatggaacaccaagctctgtgcctaagggtggaaggctgccctgccacactgcaatctaagcccaggacataaaacccctcgtggcttgtaaagaatccagggctctgggcataaaacccctcatagcctctggaatgtgtccagactcgctggccccttgctccttgctctcccaagatcataaactggttgtgtcttgagtgaaaagaacctgttctcctttatctcaactagcagagcatacgctaaaccgtcatagctacgcttggtgcaccactacctttctacccccatgtccgcacgtcctcaccacctgcttctttgtttgattaccaataaatagtgtgggctcccagagctcggggcctttgcagcctccatacaccagcgttggccccctggacccatcctatgtactcttaacttgttttgtctcattcctttgattccgccggacttcgtagcccccacgacctggtgttgggtctgatcaccccaacaagcctggtcaacatggtgaaagcccgtctctactaaaaatacaaaaattagctgggtgtggtggtgaatgcctgtagtcccatctacttgggaggatgaggtaggagaatcgctggaacctgggaggaagaggttgcagtgggcagagatggcgccactgcactccagcctgggtgacagagcaagacttcatctcaaaaaaactaaataggctgggcgcaatggctcacacctgtaatcccagcactttgagaggccaaggcaggtggatcacagggtcaggagattgagaccatcttgactaacaaggtgaaaacccgtctctactaaaaatacaaaaaaaaaaaaataaaaaataattagccgggcgtggtggagggcacctgtagtcccagctaatcgggaggctgaggcaggagaatggcatgaacccggga[132 bp omitted]taaccccattgtgtcactctctcttgagcctgcccacatgcctttttcttgtgtactttttgctttgcaataagtctccttactttcactatcttctgactcatccttgaattccttacttctcgtgatgatgtcaagagcctggcatttggggacctctcacagcccactggtatcaccttttttttttttttttgagacagagtgttgctctgtcgcccaggctggagtgcagtgggacggtctcagctcactgcaacctccacctcccagattcaagtgattctcttgcctcagcctccagagtagctgggattacaggtgcctgccaccatgaccatctaatttcttgtatttttagtaaacacggggtttcaacaggttgcccaggctggtctcaagctcctgacctcaggtgatccgcctgcctcagcctcccagagtgctgggattatgggggtgggccaccatgcccggccaacaatgatgtttcttttcctcgccgtcttagacattgctttaggaaacactctctattcgaattatttattagacctcgcctgctcccataggaaacttcccaactagacggctgtccctttaaaactgttttcctgcaatgttacccacctggcctggcctcagtactataataatacccatgccatctctcctacaggcaatggtatctactttgtaccacttattcaatgccatttatagggcaagtttttttttgttgttgttgttttttttttaacaaagtatcgctcttgttgcccaggctggagtgcaatgcgtgatctcggctcactgcaacctctgcctcccaggttcaagcgattctcctgcctcagcctcccaagtagctgggattacaggcacctgccaccatgcctggctaatttttttgtattttcagtagagatgggggt[148 bp omitted]catttttgccctgatggtaccatcaaatacatttcttcttgtctccctggagggtcttagtccctctgtagacaattatgcccttctctactcccatagctgcctctcataataatggtattattttaaattaccactttccagtcaaattctttttttctcttttttttttgagatggagtatcactctgttgcccaggctggagtgcagtggagagatcttggctcactgcaacctccacctcctgggtttaaataattctcctgcctcagcctcctgagtagctgggattacaggcacccgccaccacacccagctaatttttgtatatttagtagaaatgaggtttcgccatgttggccaggctggtctcaaactcctgacctcaagtgatctgcccacctcagcctcccaaagtgttgggattataggcgtgagccactgtccctggcctccccccaaattcttatcccattcatgcttaaaccaaagcgtcacttagataacagagatgctcaaccttcttaactcccctcccacatgggtttgtgctcccaatggatacctttggctatatggacgctgtagtagtccgttgtcacactgctataaagacatagctgagactgggtaatttataaagaaaagagttttaattgactcacaattctgcatggctgggaaggcctcaggaaacttacaatcatggaggaagggaaagcaggcacgtctcacgtggtggcaagagagacagaggggcaagcgcaggaacaactgcctcataaaaccatcagatctcatgagaactcactcactaccacgagaacagtgtggggaaaaccaccaccatgatccaatcacctcccgcctggatcctacctcgacgtgtgcggattacgggcattacaatttgagatgagatttgggtggggacacagagccaaaccatatcagatacccattcagtcagcctccaaataacttttctttcatttgaaatcataaaacccatggttaacagtgtattgataacatttgtttcaggggtcaatgtataacaggacaggcaaagccctctaatatacagttacatgacatcactcacccaagtgctaagcaggcagttggccttatcttggctgaagttggggctgccatcaacttgttggccccatggggaggatttgcccatcatgaggcaactcttcaaaactttacttcttcacttagccaggcacggtggttcacacctgtattcccagcactttgggaggccaaggcaggtggatcatgaaatcaggagatcgagaccgtcctgactaacatggtgaaaccccgtctctactaaaaatataaaaaattagccaggtgtggtggtgggcgtctgtagtcccagctactcgggaggctgaggcag[139 bp omitted]tacactgctgtctcatagactacaggacagtttagataaattgagactgtcccttgattctgtaacagatgtagtaatgggtaacagattagcattagtctatccatggtctaatggaacattagtaattagtatggtcagtggaacaactgtaattaataaaacctgctgtacctatataaacacctcagatcaaatggagaaaaatatcaacaagatatacaaacaactacctggctaccttcatcatactcagactggtacagaacagctggggtcccggctaaaccctatccttaagcctggaaccgccgccctaagtgaaaacagctgaccccatttttccatccaaatgttgcctttttggcctgccacacctctatcctgtgcccacaaaaagactgccgctggcagagcaacacaagcggctgatggctgagcatcaaagactacggatagacacggctaacttcagatggcgcagcttcagggaaagatcaccttcttcccacaccctcccctggcctccattccactgagagccacttccatcacccaataaaatcctccccatacactaccctacaatctgttcgtgtgacctaattcttcctggacaccagtcaagaacccggatgctgagagggcaggggcttggacgctcccgcacagagcctgctcccaccagagaggagtgactggccggctccagcgtttgttcccttcagttcctgcactcgcttgctcccacgctccctctcatgaggagtcaccagcagcaggctgagccaaaaaagccactccagttcccgcccatgaagaggatcaaggtcaaggtgatgtaggagttaagacgaaatcacttagactgatagggcaagggagtccttggtaaggctttcctttttaatgaaaagcagccccgaatcattttctaatgaagagcggcttgtaaagttgagctgcagagataggcatgcaagctgggagcttgcctgggtgaacgccggcctggcgggaacaaggaactagggactagacatgttcaatatggtggctccatcttcccttctctgccagccacgtgtacagttaacgagcagacaagagggctctggcc[139 bp omitted]atggtgaaaccccatctctactaaaaatacaaaaattagctgggcatgatggcgggtacctgtaatcccagctactcgggaggcggaggttgcggtgagccgagatcgtgccattgcaccccagcctgggcaacaagagcgaaactctgtctcaaaaaaaaaagaaaagaaaaaagaaaaaaagattaaggaggcctatataatgtttgagcagggaataaagtaggaatttggcaggactaacttccaagacaacatgtgacacgaccctgctgataacacaggagacagtaaaagaaactggccaaaaccagctggaaccaagacaggatgaaagcgacctctggctaccctcactgctcattatacactaattagaatgcatttgcatgccaaaaacacttccacccgcgccatgacagtttgcaaatgccacggccatgctgagaagttactcagtatcatctggatgggggagaaaattcgggttctgggagctccctgttccttacccagaaaactcatgtataatccaccccttatttagcatataatcaaaaaataactataaccataaaaatatatcaaaacagccaaccaatagcccttaggactactctacctgtggggtagccactctttgattcactccgtttttttttttttttttctggagacagggtctccctctgtcgcccaggctgctggagtagagacatattctcggctcattggaaactccacctcccaggttcaagcatttcttgtgccttagcctcctgagtagctgggactacaggcacacgctaccacacccggctaatttttgtatttgttttgttttttgttgttgttgttgttttgagacggagttccactcttgttgcccaggctggagtgcagtggcaccatcttggctcaccgcaacctccgcctaccgggttcaagagattctcctgcctcagcctcccaagtagctgggattacaggcatgcgccaccacgcccagctaattttgtatttttagtagagatggggattacaggcgtgagccacagcgcccggccaatttttgtattttttagtagaaatggggtttcaccatgttggccaggctggtcttgaactcctggcctcaagtgatccacctgccttggcctccaaagtgctgggattacaggggtgagacactgcacccagccccttttttcctttactttcttttttttttttgagacggagtttcacttttgttgcccaggctggagtgcaatggcgtgatctccgctcactgcaacttctgcctcccggtttcaagagagcctcctctctcagcctcccaagtagctgggattacaggcacatgccaccacgcctggctaatttttgtatttttagtagagatagggtttaatcattttggtcaggctggtctcgaactcctgacctcaggtgatccgcccgcctacacctcccaaagtgctgggattacaggcatgagccaccacgcctggctattcctttacttccttaataatcttgctttcactttactgaatccacttgctcttcaatgtattattttttttctagacagggtctcactctgttacccagactagactgcagtggtaccatcatggctcacgatagcctcaacctcccagactcaaacaaccctccggcctcagcctcccaagtagctgggactacaagtaggcaccaccatgtccacttggccaatttttaaaattatttttattttcatttatttatttttttgagacagagttgcccaggctggagtgcaatggcacgatcttggttcactgcaacctctgcctcctgggctcaagcgattctccagcctcagtctcccaagtagctgggattacaggtgcgtgcctccatgcccagctaatttttgtattgttagtagagacaagatttcactatgttggtcaggctggtctcgaactcctgacctcaagtgatccgccagccttggcctcccaaagtgttgagattacagggtaagctaccgcgcctgagctaaaattatttttagtatagacagagcctcactatgttgcacgggctggtcttcaactcatgttgctcttgaattctttcctctgtgaagccaagaacccacttggcctcccagactgaaccccaattttggggtgcgtcctgtgacagcaggaccaatataatgctgtttcctgtagttactgccaccacaataccacagggtcctctttttgccttttcagtttcctagttaccaatcctttaatacctaaatttatttatattcgatcatctctgttaaaataaccagtgtgatttctgtctcctgaatataccctgactgacacagatatttgtaataggaaggagctttccaaaggtaggttttggaaaattgtttattcatttatttatctattattattttttgagacagggtcttactctggcgcccaggctgaaggagagtggtgtgatcatagctcattgcagcctcgagctcctgggctcaagcaatcctcccacctcagcctcctgagtaggtgggaccacaggcatgcaccaccatgcccagctaatttttattttattttattttatttatttatttttgagacagagtctcactctgtcgcccatgctagagtgcagtggagccatctcggctcactacaagctctgcctcctgggttcacgccattctcctgtttcagcctcccgagtagctgggactacaggtgcctgccgccaagcccagctaattttttgt[169 bp omitted]gactttgaaacttgaggctggg[135 bp omitted]aaattagccgggcgtggtggcaggcgcctgtagtcccagctactccagaggctgaggcaggagaatggcgtgaacctgggaggcagagcttgcagtgggccgagattgcaccactgcactccagcctgggtgacagagcaagactccgtctcaaaaaaaaaaaaaaaaaaaaaatcacccaggcatggtggcatgtgcctgttgtcccaggacctcaggaggctgaggtgggaggattgcttgaacccagggggtcgagactgcgatgagctatgttcaagccacttcactccaacctggttgacagagcaagaccccatctcaaaaaagtcattccttcagtctccttcaaccatcactccagtgaaaatacttttgttgctcaatgctataatcagtttcccggttctcatcgtagctgaccaacagaagcatttggaattgattgctcccttctcatcggtacattttttcactgccttcaaggacatcgtcttattttattttattttatttttgagatggagtttcactcttgtcacccaggctggagtgcgattgtgcaatcttggcccactgtaatctctgctcccaggttcaagcaattatcctgcctca[134 bp omitted]cggcctcccacagtgctgggattacaggcgtgagccaccgtgcccggccacatcatcttattttgattctcctcctactcactggttattccttttcgttttccaccgtgagttccatcacttatttgattttaggcttctgaattttggagtgctctgaaacctaggttgttctctcactcgctgtcgctctaagatgagctcaggactttaaactctcagctccagaaggagttattccaaagagctcgcaaacctgtgggtatgtgtagcaatggattctaagggtt[131 bp omitted]atctccacctcctcggttcaagtgattctcctgcctcagcctcccgagtagctgggattacaggcgcccgccaccacgcccagctaattttttgcatttttagtagggatggggtttca[132 bp omitted]tgagacagagtcttactctgtcacccaggctggagtgcagtggtgtgatcttggctcactgcaacttctgcctcccaggttcaagcgattctcctgcctcagcctccagagtagctgggttacaggtgtgcaccaccactcccagctaatttttgtttttttagtagagacggtgtttctccatgttgtccaggctagtcttgaactcctagcctcaagtgatctgcccacctcggcctcccaaagtactgggactataggcatgcaccaccacgcctagctaatttttgcatttttagtagagacggggttttgccatgttggtcaggctggtctccagctcttgacctcaggtgatccacctgcctcagcctcccaaagtgctgggattgcaggtgtgaaccaccacgcccaacctagtttcttagaaataaacatttaatagggacttaagaacagaagctggaccagggacaatggctcatgcctataatcctagcactttgggaggctaaggccagtggatcacttgagcctaggagtttgaaaacagcctgggcaacatggtgagaccttgtctctacaaaagataaaaaaattagccaggcatggtggcatgcacctgtggtcccaactactcgggaggctgaggtggacgaatcagttgagcccaggaggttgaggctgcagtgagtcatctttgtgccactacactccagcctgggc[221 bp omitted]gaggcagaagaatcgcttgagcctgggaggtggaggttgcagtgagacaagatcgtgccattgcactccagcctgggcgacagaatgagactctataaaaaaaaaaaaaaaaaaaaaagacagcagatccctgcactgttacccccccagacctaaagcttatagaccataaagaaaaggtgattggccgggagcggtggctcacacctgtcaggctggagtgcagtggcgcgcgcgatctcagctcattgcaagttccacctcctgggttcatgccgttctcctgcctcagtctcccgagtagctgggattacaggcgcctgtcaccatacctggctaatgttttgtatttttagtagggacggggtttcactgtgttagccaagatggtctcgatctcctgaactcgtgatccacccgccttggcctcccaaagtgctgggattacaggtgtgagccaccatgcccagcctaaactggaaatcttagggcccttcccagagctggggtgagtcagatgccaacatggcagatgagcatccaagatgaagttgcttttccctctaccagtggtctcagaaaacagatgctagactgagcgcggtggctcacacctgtaatcccagcactttgggaggccaactgcacctgaggtcaggagtttgagaccagcttggccaacatggcgaaacgctgtctctattaaaaatacagaaatcagctaggcatggtggcgggcgcctgtagtcccagctactcgggaggctgaggcaggagaattgctcagacctgggaagcagaggttgcagtgagctgagatcgcgccactgcactccagcctgggtgacagagtaaaactccgtctaaaaaaaaaaaaaaaaagatgctgaagacgggattctgggattaggttattcacctctttgctctttgatgagctgtttaatgatgtgatgatatcctgggaggtggaaaacgggatgacagttattgcatgtagtgccatcattcattatttattatctttggttgtttgcaatgaggttccagtaaacaaatcaaaagccttggctgggtgcggtggctcacgcctgtaatccaagcactttgggaggccaaggtgggcggatcacctgaggttgggagttcgaggccagcctgaccaacatggagaaaccctgtctctactaaaaatacgaaattagccaggcgtggtggcacatgcctgtaatcccagctactcaggaggctgaggcaggagaagcacttgaaccagggaggcagggttgtggtgagccaagatggcgccattgcactccagcctgggcaacaagagagaaattccgtctcaaaaaaacaaaccaacaaacaaacaaaaacaaaaggctttagccaggcatagagggcacacctgtagtcccagccattgggagtctgaagctaggggattacttgagccctggagttcaaggctgcagggagctgtggcattgccctccagcctgtgtgacagaatgaaattctgtctctaaaaaaaaaaccttctgttgttgttgttgttgtttgtttgtttttgagagggggtctcgatctgttgccagcctagagtgcaatggcgtaatctaggctcactgcaacctccgccttccgggttcaaacgattcccctgccgcagcctctctagtagctgggactataggcacgtgccaccacgcctggctaattttttgtatttcagtagagatggggtttca[138 bp omitted]ctgctgaccttgaccaatatagtgggagcgatgagggctgtggaacagaacagctatttctgtcacactgggaagatgacataaagaaaatgatgagctcaggactttaatctcagctccagaaggagatggagatgctgtgtatttccaaagagctcgaaaacctgggtgtatgtgtagcaacagattctaacagtgttggaccagggaggatggaatgtcaagtttgatgggaatgaattaatgtattaattctgaatttaatgtgctagcttgagcagctgtaagtagctctaataataatggaccaaaacttgggttcagtgatggcctacatttaagtaggttaatatcccagaacctccctggtagaatgtcaagaagagaagataaagtggccgggggggtggctcaggcctgtaatcccaccactttgggaggctgaggcaggcggatcagctgagctcaggagtttgagaccagcctggccaacatggcgaaaccctgtctctactaaaaatataaaaattagccgggcatggtggtgcgcatctgtaatcctagctactcaggaggctgaggcaggagaatctcctgaacctggaaggtggaggttgcaggttgcagtgagctgagatcatgccactgcactccagcctgggtgacagagtgagactgtctcaaaaataataaataaataaataaataataaataaaataatctaaaggatttgggaggtagcaactctggaatagacttgttatgtgcaatcatttgtctctcctcctgtatatacccccgggagtacacaggaacattcttttcattgagaaatgaactagggaggagtataaataagtggatggatggatggatggatggatcaatcaatagatccatagagtgctctccattcaacaattgaagcacacacatttttttctcaagcacacttataaaaattgatctgtactaaaccaaaagaaagccccgataaattcaatgaacaggtatcatacagatcaatgtttctgatcactatgcaattagatctctagttaatgtcaaaaagaggaatttaaaatcctcatatatgtggaaatttaaattgttttaatttttgcttttgagacggggtcttgctctgtcacccaggctggagtgcaggggcgcgatcacagctcactgcagccttgaccacccagactcaagccatcctcacacctcagcctccctagtatctgggactataggcacgtgctaccacggtaagctaattttttttttattatttttagcagagacaggggtcactatgatgcacaggctggtcttgaactcccgggctcaagcaatcctcccgcctcggcctcccaaagtgctgggataaggtgtgagccaccacacccggctttccctgcattccaggggacttgtttacagtcttttaactttgaattcttttgttgttttaagtgtgtttctttctgtctttctttgtttttttttgttttgttttgtgtttgagacagagtcccactgtgtcacccaggttggagtgcaacggcgcaacctcggctcacggcaacctctgcctcatgggttcaagcaattctcctgcctcagcctcccaagtagctgagattacaggcatgcgccaccactcccagctaatttttgtatttttagtagagactgggttttaccatgttggccaggttggtcttgaacttctgacatcaggtgaaccgcctgcctcagcctcccaaattgctgggattacaggcatgagccaccgcccccggccagtgtgtttgttataaaacagcattgatctggatttagtgtgtatatgttttaatccatgttgtcaaactttgtcttttaactggtgaagtcttgttaatttacatttaatgattaatataattgacattgtttatcatcttcatgtattatattacttcagtttatctctccctcctcaaaccccaaaatgtgaatataatctagactttaaattcttaactattgaggatatat[356 bp omitted]aacagaaaactttatcaaattattctaaccactttacttcatatgtttcttgcaatatcttctggatttgcatttttttctctttattattttattttattttttgagacagagcctcattcactctgttgcccaggctggagtgcagtggcgtgatcttggctaacggcaacctccacctcccaggttcaagcgattttcctacctcagcctccctagtagctgggattacaggcatactccaacatgcccaggtaagttttgtatttttagtggagacagggtttcaccatgttggctaggctggtctcaaactcctaacctccagtgatctgcctgccttggcctcccaaagtgtcgggattacaggcatgagccactgtgcccggcctattgcctcattttcacctgaagaaattggctattctgccagacacagagggtatttccaggtatattctgtctgttagagagggtatttttactttgaggaactgccaattccctattctgtcttttatggagggaaatatcataactctgtgctttccctctgagctcagaggtgtactggcgggggaggggtattaaatctatgggtgaaaagccctgggtataaaaaaaaacattgtccggctgggcacagtggctcatgcctgtaatccagcactttgggaggccaaggcaggaggatcccttgagtctaggagttccaaacaagcctgggcaacatagtgagacactgtctcaatttttcaatgttttttttttgttgtttgtgttttttgttttttttttttgagacggagtctcactgtcacccagtctggagtacaatggcgcgatctcagctcactgcaacctctgcctcccgggttcaagcgattcttgtgcctcagcctcccgagtagctgggactacaggtgtgtgcctggctaatttttgtatttttaatagagacagggtttcaccatgttggccaggctggcctcaaactgctggtctcaagtgatccactcgcctcagcctcccaaagtgctgggattatgggtgtgagccaccgcctctggtcctggctgacatcttgactctaacttcatgaggatctcagccaggacctaaccccaggagtgaggttaactgattgtatttctgaccttcagaagttgagatacatttgttatcttaagcaactaacttatggggtatttttacacaacaatagacaactaatatagttatctagtaataatcagcctaaaaaatgttgacttgacagacctatactataccacagaaccttgtttctaccaccattgccatctcaaagaactgtaccaccaccagcacctctgtggggaccacgacatcctgtttgctgaaaattaaataaatcacagtgggctgggtgtggtggttcacacctgtaatcctagcactttgggaggccaaggcagacagattgcctgagctcaggagtttgagaccagcctgggcaacatggggaaaccttgtttctactgaaaatacaaaaacttagccaggcatgatggtgtgcgaatgtaatcccagctactcgggaggctgagacaggagaattgcttgaacccaggatgtggaggttgcagtgagccgagatcacacgcacttcagcctggacgacagagtgagaatctgtctcaaaaagaataataaagttaattaattaattaaaataaataaatcacattgggcatagagggagtgcatggtgtgtgtgcaattcactaggactctggtcccaaaaagcagacagaattcatgctagcatgagaggccatttattgttcaggggctgagcccccctgttttgggggggttcctgcactgctgcctccccccattgttcccgtggacccctcaagtggcaggttgctgagatgatcgtggagggagcacatcttcaagtgtagatggtccagagtggccatcttctccctgtcatgaggcagcggggagttgatggcggcatggctaggtgctggggtgttggagtggaaggggagatcaggccctttccccaagatctcaccctcctcccatgccctcagcctccttcctcactctggcttcatcttgtctgtcagcagtaggttcttggcccgcagggcctcgtcttgggccagccgaagggtggagctcagggcctctgccctgacgtgtttggctaaggcctggcgctccagctcctggggagaggagcgtaggcgtagctgggcttgctggactgggctgggggtggagggggaactggattgcggagggcaaagggtagggtcccatggggcccacatttctccctcagagtttcccatcatgccttgagcttgagactgaccccagcatcccacaatgcactggtctccagattccgctgtggactaaatctgtgtctgtcctattgtctgtcccatgatgcactgacctatgtcccagcaagcactaaatcagtgcctatcgtctgtctcctaagctcatgaactatcctacatttgatatgtgtgtgcaccccagtattctaccacatggtgacctcctacattccataatttggaagaccccacatct[135 bp omitted]acagggtgaaaccccatctctactaaaactacaaatattagctgggcgtggtggtgtatgcctgtaatcctggctgctcaggaggctgagacacgagaatcgtttgaacctgggaggtggaggttgcaacgagccaagatggcgccactgcactccagcctggagcaacagagcgagactctgtctccaaaaaaaaaaaggccgggcgcagtggctcacgcctgtaatcccagtactttgggaggctgaggcaggcggatcacgagatcaggagatcgagatcatcctgactaacacggtgaaaccctgtctccactgaaaacacaaaaaattagccaggtatggtggcaggcgcctgtagtcccagctacttgggaggctgagg[139 bp omitted]gttctctacgtacaactgcaccaagccccatttcctctcatgtattagtcctatagctcggccacatcaatgtcccacagtgcctcacttgtctgtctcacccactacaacataatcctatagtacattaggtcaatatcccataatacagtgcactagggctcaagttccaccaactattgggctgagtgtgttgtgcaatgccccaggaagagctgtggttccatttcccataacgcatcagctaactggggcctacagtcactgggtctcctattttacctcaatatagctgaccccaatgatcttgtacaatgcaccgcctctctaaaagtttagagaaaatcaggcctatgttccatgaagctttagactggtgtctgtctcgtgtcccacaatgcactagatccaacgtcctatcatgctttaggcccaagtccatcttccgaggtagcgtaatgattggcctgtgactcactcaccaccaaactgcttgtccatctccccatgcattagggccaagtcctcccccagtgcctgctgctcccagctcagcccttccccttctgccacacaccagcagtacccttgagtccggggttcccctccccttgccccaacagaaaagtaaagtgggacatggtggcccatattccctggtaccagaatcttcttgtgtagcctctgacagctgggacaggcaggagtcaggcccctctgcttcacctcgtccactagtgaggtcagtgctcggtccagcagctgctgcagggactccgtagacaactgcgacccctggctgggggaggggcggtcaccagataaagaggcccagtaccaactccaggacgccccatgccccatgctcacctgtggagcctccatttggcctcgtttccagtatgcaccctatgcaaccttcccagcatgcactgtgcaccagctgtcccttggtttccatggtgctctggggatcactactccttttttttttgagacggagtctggctctgttacccaggctggagtgcagtggcgcaatcttggctcactgcaaccttcacctaccgggttcaaacaattctcctgcgtc[211 bp omitted]tctcgctctgtcacccaggctggagtgcagtggcaccatcttggctcactgcaacctctgcctcctgagttcagcgattctcctgcctcagcctcctgagtagcaggtattacaggcacccgccagcacgcctagctaatttttgtgtttttagtagatatggggtttcaccatgttggccaggccggtcttaaactcctgacctccggtgatcctcccacttggcctcccaaagtgctgggattacaggcgtaagccaccacgcccagccagagtcactattcctaagggcaccagacagccctcagtttgcaaaggccgtcaagaactaacatttcccataatacactagtgaaactcgatttcatgttgtactgtgagtccccctttcctacaatggaccttcccacaatgggccaaaaatggtgtatccctcggctctcacaatacaccaaggtctcacttccccctcagtgcactgaaaccctgcctctcctcatgttcacatcccagccttcccacaatgcactggaaatatgatgcttaaaatgtactaagtgtttttttttttttgagatggagtcttgctgtcgcccaggctggagtgaaatggcacgatcttggctcactgcaccctccacttcccaggttcaagagattctttggcctcagcctcccaagtagctgggattacaggtgctcaccaccacacccagctaatttttgtatttttagtagagatggggtctcaccatgttggccaggctggtctcaaactcccgacctcagtgatctgcccgtcttggcctcccaaagtgctgggataacaggtgtgagccactgcgtccaccctttttattttatttttattttattgagacacagtttcactctacctactaggctggagtgcagtagcgtgatctcggctcactgcaacctccgcctcccgggtccaagtgaatttcttttttttttttttttttttttgagatggagtctcactctgtctcccaggctggagtgcagtggcatgatctcagctcactgcaagctccacctcccggatttacgccattctcctgcctcagccttcctagtagctgggactacaggcacccgccaccacgcccagctaatttttttttgtatttttagtagagacggtgtttcaccatgttagccaggatgctcttgatctcctgaccttgtgatctgcctgccttggcctcccaaagtgctgggattacaggcatgagccaccgcgcccagcctggtccaagtgaatttcatgccccaacttcctgagtagctgggattacaggcacgcgccaccacgcccagctaatttttgtatttttagtagatacggggtttcaccacgttggccaggctagtctcgaactcctgacaccaagtgatccgcccaccttggtctcccgaagtgctgggattacaggcgagagccaccgcgcccggcctgtaccaagtttctcttgagttccacaagacactgattctaccttgtagagtgggaacaaatgaggcttctagtgcagcaggaccggctgtttctacaatgcactgggataccttgtctcccaaaatgaacagcgccccacccttcactaatgtcccatctccttccgcatctcctttaatgtcctatccacaaggctcccagaggcaagcccagccccgttacctggcacagcgggcacagttgccttggtgggaccgatccaggttcatggagaggtcaggccctcttcgagagttctgaaattgccgcccgaactcctccagaatgggtttcagtgggcccagcccctccagttcgctcctcagtgaagccacagacactgctgaccgctccaccctgaggcatgagtaaccagtgctgctgggtcgtctcttcagcggtataaccctggcaagactccacccattattagcccaccacttgcgtctccatctggtcagcaattctccaccctgccctcccctctctgctctgactggcctcactttttgtattttactttatgttatgttatttatctgttgactattttgagccagggtctggctctgtggcccaggctggagtgcagcagcaccatcatagctctctgaagctttgaactcctgggctcaagcgatcactcctgcctcagcctcccgagtggctaggactaccagggtgcgacaccacaccactcccagctaatttttaaattgtttgtagagatggggtctccgctatgtggcccaggcttgtcttgcactcctggcctcaagtaatccgcccacgtcggcctcccaatgtgctgggattatagatgtgagccacctcactgggccaccttttgtagattactgtttggaatgcccctcctagttctcttaattgattttctcggatcccacttgaccccaccctttgcccttttaaggtatagaccacaccccttctctaattgattccacccctcaggccttattagggctgatgcaacccttcctgctctctaattggtgtttcccgatgtcggtatatgttccggaatgcctggccatagctgattggcctacccatttccctcaagaccccgccctcaggttgggattgccctgccccttccggtcttcccatgcactggccccaatcctcacatggtgcacagctcatccgcccgacctcgcagctcctgcaagtcccgcgccgtctgtgcctgttcgcgctgtgcccgctcccactggcctaggaagccgtcgaccctgccgcccaggcccccgagcagccgcagggcttcctgcaccgccccctcctcctgatgccaccgggcggtcagtgaggacacctctctcctggaggggcagaggaggggaatgggtaggggctaggcttcaacaggtccccacctacccccacgagataggtgggacaggactcacctatctcgccccactgagaccatgcccgtggctccagacccacccaggtcaccaaattttattgcaccctccatttggtgaaatttggtcgtgtcctccagagccccgcctttatccccttcctttattggctatcttggccctttcctggtcaggtccccaacctctacctgggctcctccagacactggccccccaaggcactgcccaccctactctgccccacgtggtgcctccaggaccactcctctcctaagccccgcccacctcagtttcaccaggcctggacctgcctcccagcagcccagaactaaaaagttccttattctgtccctcccttgctcaggtcactgccttcggggcactccctcctctgctcttggagaccccagccttgtcgccttccggttaagatctaggccgggcgcggtggctcacgcctgtaatcctagcactttgggaggcc[135 bp omitted]aagcaggagaatggcgtgaacccgggaggcggagcttgcagtgagccaagacggcgccactgcactccagcctgggcgacaagcgagactccgcctcaaaaaaaacaaaacaaaacaaaaaacgatctttgaggaacctcccctgtgtccccgcccaccgcagctcctggagactcctcccgtgtctctacccaccttcgttcctcgaggctcctcccatgttcccgcccacctcaggtccccgaggctccacccatgtcaccgcccacctcagctacttgagaacccccgtcccttgggtcccgcccaccgcatctcctcgaggctccacccctgagtccccgccgatctcgttttcgaggctccgcccctaggtcccgcccacctcagctcttcgatgccggtgaacagcttctgcaattcctgctcgctcacgtaggggccctcgccagcccgaggccccattccccagcctgcggggaccaggccgtgtggccgcgagggtttgtcgggactccctggcgggccggggcagccctgggacgtggcggcggggcccaggctgttccaggagaggccagcctccggcttctgcttctcctccggctcctgcttctcctccggctcctgcttctcctccggctcctgcagctcggcctcctgccgtcgcggcgtctcatcctgcagctgctgctggaggtagcgcagcttctcctgggtggtaagggaggacggggtcacagcgtccagccgctttcctcccgcaaccacctccaccccaaaatccgctccagtactccccgagattggaagtagaacgcctgtggggacagtatgttggaagtctcactggctgtcattagggaggggaggcaccatttgaggcccagttggactccaattcccgctaacctcccacagcctgcctccaggtatccacccggccctccaagccctccaggcgtcaaataccagtcccggccacttggcaagaacaactgaagctttctcagcattttgttggaaaatgagtgggcatgtggacaggacgggccttctcacctgaagtccagctcgattctctttctgggacctgaatgtgactgcagggcaagagtcccccatctgggtgttggagcctcatttgaatccctcttatcagcgagttctaaggatgactatgtgcacgaaggtgcagtgtggtggtggtgtcggggcagggagttccacctaaaagtgtatcttgagtccctcgtgcatctgacctcctcccacaaatcctgggactgccccctagcccttacctccagcagggcagaattctgcttcaagacgttggttttgatttcagcatcttccacagaccgggtcaccttccagcagttctcctgggtcagacaccagggcgagggccctgccttcccattccagttctgcctcccaacccttagcctgtctgtttccatccaggctccaggcctcctagccccccagtacaagacacactcaccagctcatttccttggctaaggggatggcttcctccttagccagatgtgccagagtggcacccctccacttcctcccacctctcttcggtccacccattccatttctcctctttcttttctttttttcttttgagactgagtctcgctctgtcggccaggctggagtgcagtggcgcaatcttggctcactgcaacttccacctcgtggattcaagcaattcttctgcctcagcctcccaagtagctgagattacaggcgcccgccaccacacctggctaatttttgtatttttagtagagatggggtttc[131 bp omitted]tactcccattcccctctccccatccattcctgcgtcccactggctcaccttgagttgaatgcagtacccctccaactcttctgcctcttgccgccttctctccagattctcgctcagcacagaacactcgctctggagcatggaaggaggagaggttagccaaggacacgaggggacagcctgtggaaaagaagatctgggcctgggaaggttccttttctttctgagcctcaagctccccaactgagctatgggtgcattctgctggaggcaggctccaagaagggaacttggccctggaggaagggcaggtgttggatatagggggtcctcacacctgcagagactgcacgtgctggttaacccggttggtcttttccttcaagctggtgatggagtctttggcgcggaccaatccactgttgaccccactctggggaagaatgggagacaggtgagttagtgggtatgtgggggcaagccccaagcccaggaagaattccagaactgggaggctgtgtttacaccttgattttgccctggaatggctatgtgacttggagccaagggctatacctctgattcttagcattcctgcgcggcaaacccagggcataaacgacctttcttcatggtgggctgggagaaaaataggatccaggagggaaagggggatggaggtggggtgctcagacatgtggaggaagaaggatggactcaaccaaacactgagctaaatgtccttgggggccaggtgccgtggctcactctggtaatcccagcactttgggaggccgaggtgggtggatcacttgaggtcaggagttcaagaccaacttggccaacatggtgaaaccccaactctactaaaaatacaaaaattagctaggcgtggtggtgcctttaatcccagctacttgggaggctgaggcaggagaattgcttgaacctgggaagcaggggctgcagtgagctgagattgcaccaccgtactccaatctgggcgacagagcgagtctccgtctaaagaaaaaaaaaagtccttggggtccacagcttaaaaagagaaactttgaaaacacatgccctttctctccaggaactggtgaattacaaaggaagccacttttcagatatgaacacttgctatgcaccaagcacttgtcttgtcttttattcttcacaactccgcctcttgaggttatttggcctattttacaagtgagacaaatgggtctcagaaatgggatatcccttgtcttcccaagcactcagcacattaggtgatctcatcagaatctagattcagaacgcttgttttaaaccatgacaccatgtggcctctggtcatcattactttatatcacataaagtgttgtgcgactcctgccaatccgtggttcaggagggatgcatgtggtaggatccattctcccagcttggacagttacagaagccttagcctggcacatgactgcccaaccagagactacatttcccaggtttccttgcagctaggtgtggccatgtgactaagttctggccaatggaatgtgagtggaaataatgtagtcaatttatttttgggggaggtgtgtgtgtgtggggggtctctcattattaccctggctggtgtggagcggtactatcatagctcaccagctcctgggctgaaatgatcctcttgcctcagcctcccaagttgctaagagtataggtgcttgctaccatgcccagcaaaattttaagatgtttggtatagatgggttctcactacgttacccaagctggcctcaaactcctgggctcaagtgatccttttgtgtctgcctgtaagtgttggtcttacaagcatgagccactgtgcccagcctccttttttctctctcttttatttatttttttttttagcctacatcattacttagactgtgcagaattatagtcaatttctgagtcatcccttataggaaaagagtgagaactttccctttttctctcatttcactggaatgcacaattgagggctgtcttggaccagcagatagaggacacaatgaaacagaagaagcctgaatccttgacatggagccaccatactccattccaaccacctgtgaagactttcagggtgagacattacatcttctgtgttattcaagctgtgttattttgtgtttttttgttacagtagtcaaatgtataacttcaatatcattgacattctttttttttttttttttgacagagtcttgctcttttgtcaggctggagtgcagtggcatgatctcggctcactgcaacctctcactcccaggttcaagccattctcctgcttcagcctcccgaatagctgggactacgggcgtgcaccaccacaccaggctaattttttgtattttagtagagacagggttt[134 bp omitted]aaaagagacccagagagccctctgccagctgtttatgaccagttccagccgatggaagggaagtgggcactggtcgatgtgtggaaaagacaggcatgatctcttcccctgttccccctgcttaatggctggaaggcagtggcgagagcaactgtctagaaatggctgagcaaccagaacgtagacacctgtaacctgctgcatttgaagagcagagctactaagcttatcaagcattttatgtgcaaaaaagcagttctcttggtttctctcatggttgctgaactaatacacaaaagatagacagaataagtttcctcccttgtgagatggaggcagcaacacatttcttgcatgattgctctggggaagaagtggaataagaaatattgtatccagttaac[131 bp omitted]tggagccccgtctctactaaaaatacaaaaattagccaggcgtggtggcaggcagttgtaatcccagctacttgggaggctgacacaggagaatcgcttgaatccaggaggcggaggttgcagagagcctagatggcgccattgcactccagcctgggcgacaacgagattccatctcaaaaaaaaaaaaaaaaaaaaaaaggaattcaaaaattccacccctccataaaaacaatgaaaaaactaacaaaaaccataagaagcagtttgttcacaattctggaaattaaccaaaggcttgcagcaactcaaagagcatttattcaagaaaagtgactctcgataaaaaacggcaagacttgaggaattttaacttatcctagtcctatctcccactccctagctcagcaggaaccctggaaaataacagcccacatttcccacagggaggaagcagaatgaagctagaactcattcaaagcctcataacccaaagaagagtcattctatgattgttaagtgatgcctgggaagaccccacacagaatatttgtctttccttttcagaactggcaaagccgtgaaagcatctctgatagttgaaggaaagatttggatgtttgtcctctccaaatctcatgttaaaatgtcatcccttgccaggcacagtggctcacacctgtaatcccagcactttgggaggctgaggcaggaggttcacttgagctcaggagtttgagagcagcctggacaacatggtgagaccccaactctacaaaaaaaaaaaaaaaaaaaaaaaaagtagccaggtgtggtggtgtgcacctgtagtcccagctcctcaggaggctgaggttgaagaatcgcttgaacctgggaggtggatgttgcagtgagccgagattgcgccactgcactccagtctggatgacactgagatcctgtctcaaaaacaacaacaaaaaaatgtaactcccaggctgagcgtggtggttcacacctgtaatcccagcactctgggaggccaaggtgggcagatcacctgaggtcaggaattcaagactagcctggccaacatggcgaaagcccgactctactgaaaatacaaaaattcgccaggaatagtgatgcatgcctgtagtcccagctacttgggaggctgaggcaggagaatcgcttgaacccgggaggtggaggtcgcagtgaaccgagatcatgccactgctctccagcctgggcaacagagcaaaactccatctcaaaaaaaaaaaaaaaaaaaacttgtgtggcatctccttgctcctgctcttgccaggtgatatgctggctccatcaccttttgctatgaggccctcaccaaaagctgagcagatgttggcaccatgtttatcagatagcctgtgaaccataagccagttaaacctcttttatttatacccagccttgagtattcctttatagcaatgcaagaatggactaacatggagtgggagagggaacatttgtaaagaaaaaaaaattttacgcttgttttaatgttgctactgccgaaggcaatggataacagttggggtaaacaataaaaagcaaaaaatcttaaaaggaaaatctgatggacatatctgtagaagccttgaaatgttccaacaaattcctgggaatgtagaaagccattggcctgtgtagggttgtgtacatgcttgggaaagttctgagaaggccccaagcttttcacctctggctgaccttgaaaccttgaaacgctgcacaagcaggaagggaaggctaaggtagagttgtaaattgtctgagtgttaaaggtgtgcctcatcaggcacacagagtgccatttggcaaagactagaagattttgttgttgttccagtttaaggaaatgtctctccaatcattagctaaccactaaaattagagaacagagacttcagtggccaaacatgacaaagaacacagatattacagaaatagttcagaaaagtctgttttttaaaaagcaactacaggccaggtgcagtagctcacacctgtaattccaacaatttgggaggatgaggtgggaggactgcttgagcccagaagttcaagaccagcctgagcaacatagtaaaa[175 bp omitted]gtggcgggcgcctgtagtcccagctactcgggaagctgaggcaggagaatggtgtgaacccgggaggcggagcttgcagtgagccgagatcgcgccattgcactccagcctgggcaacaaagcaagactccatctcaataataataataataataataataataataataaaataaaattagctgagcttggtagtgcacacctgtagtcccagctactcagaaggctgaggcaggaggatcccttaagcctgggagttagaggctgcagtgggccacaatcatgccactgtacagtggcctgggcaacagagcaagatcatgtctcaaataataataaaaataaataaataaaaataataaaataaaaagcaactataacaagcaataataacaacaaatccttatgagtggggagaatctgtttctagggttgctacattatgatactttattttttattgtattttttttttttgagacagagtctccctctgtcccccaggctggagtgcagtggcatgatctcggctcactgcaacctctgcctcctgggttcaagcgattcccctgcctcagcctccccagtagctgggactacaggcacccgccaccacgcctggctaatttttgtatttttagtagagatgggggtttcaccatattggtcaggctggtctcgaactcctgacctcaggtgatctgcctgacttggcctcccaaagtgctgagattacaggcgtgagccaccgttccctgctacattatgatactttaaatggccagttttcaggccaggcacggtggctcacacctgtaatctcagcactttgggaggccaaggcaggtggatcacctgaggtcaggagtttgagaccagcccagccaacatggttaaaccccgtctctgctaaaaatccaaaaattagacaggcatggtggtgcacacctgtaatcccagctactggggaggctgagtcaggaaaatcgcttgaacctgggagtcagaggttgcagtgagccaagatcatgccgctgcactcaagcccgggtgatagagtgagactccatctcaaaaaaaataaaaaataaaaaatggccagttttcaacaaaaaagttataaggcatgcaaagaaaaaaaactatggcctatacaatggaggacaaacaagcagtcaagagaaactgttcaggggtaggatggcgggggcagatttggacttactaggcaaacactttaaatcagctactttaaatatgttcgaagtgctaaaggaaaccattcctaaataactaaaggaaattgagagaataatgtctcaccaaatagggcatatcactaaagagacaaacattattaaaagaaaccaaatagaaattatagggttgaagggccaggcgcaatggctcacacctgtaatcccagcactttgggaggcc[133 bp omitted]aggcagcagaatcgcttgaacccaggaggcagaggttgcaatgagctgagatcacactactgcactccagcctggcaacagagagagactccgtctcaaaaaagaaattctagggttgaaaagtacaataaccaaagtgaaaaatgtactagagggggctctgtagcagaataatgattcagtgaacttgaacatagctcaactttgattatccagcctgagaaacatgaaaacaaaaagaatgaagaagaatgaatacagcctcagagacctatggatctgggagtcccagaaggaaagaaaggggcagaaagaatatttgaagaaataatggttgaaaacttccaaaacttgatgatttgaacataaatccacacatccaagaagccaaatgaactccaaataggctccaggggccgggccaagtgactcactgctgtcatcccaggactttgggaggctgaggagggtgtattacttgagaccaagagctcaagaccagcctggccaacatagcaaaaccctgtctcataaaaaacaacaataagaaggctggacatggtggctcacacctgtatttccagcactttgggaggccaagatgggaggatcgcttgagcccaggagtttgagaccagcctgggcaacaaagtaacacctgcgtctctaaaaataaaaatgaaaataaaaacacttttaaaataggataaaatgggccaggtggctgggcttggtggctgatgcctgtaatcccagcactttgggaggccaaagtgggtggattatgaggttaggagtttgaaaccagcctggccaagatggtgaaaccctgtctctactaaaaatgcaaaaattagcctggcgcggtggtaggcacctgtagtcccagctacttgggaggctgaggcaggagaatcgcttgaacctgggaggcggaggttgcagtgagccgagatcgtgccattgcattctagtgtgggcgacagagcgagactccatctcaaaaaaaaagaaaagaaagaaagaaaaccacagaccaatatcctttatgaatatggtcacaaaaatcatcaacgaaatactagcaaaccaaatccaacagcatgtaaaaaggattatacatggtgaccaactgggaattatcccaggaatgcaaggttggttcaacatactaaaatcaaccaatgactgggcatggtggctcatcccagcaatttgagaagctgagacaggaggatcacctgaggccagaaattctagaccagccaggtcaacatagtgagactccatctctaccaaaaaatttaaaaattatctgggtacagtggcatgtgcttgtggtctcagctccttgggatgctgaggtgggaggactgtttgagcccaggaggttgaggctgcagtgagctatgatggcaccattgcactccaacctgggcaatggagcaagactctgtctctaaaaacaaataaatgttacataccatattaatagaataaaagggaaaaaaaacacatgatcatgtcagttgagaaaaagcttttgacaaaataccactcatgattaaaaaaaaaaaaacactccacaaactagaaatagaaaggaagaaaggaacttcctcatcccaataaagggcagctacaaaaatcccacaaaatgtgatagtttaaaatatgtccataaattctttcacattcctttaaaacgtggagccttatttgcctcacttgagtatgagctggacttggtgactcacacccaggaaatagaataaggcaggctagttgtggtggctcatgcttgtaatcccagcactttgggaggccgaggcaggtggatcacctgaggtcaggagttcaggaccagcctggccaacatggtgaaaccctgtttctacaaaaaatacaaaaattagctgggcatggtggtgcacacctgtaatgccagctactcaggaggctaaggcaagacaattgcttgaacctgagaggcacaggctgcagtaagccgagattgcgccactgcactccagcctaggtgacagagactctgtctcaaaaaataaaaaaatagaataaagtagaattgatgatatgtgaggtaagagactacttcataagaggaactgtttcttatttgctctctcttcatctagggaacgatagcctcaatgtcataagcagccacctatgaagaggcccatgtagcaaggaattgaggcctccagccaagggcaggtgagtgccccattttggtagcacaacctctggccccagtccaaccttcaggtgactgcagccccagccaaaatcttgtttgcaacctcgtgagacgccctgagccaggcccacccagctgagcccctccaagtttgttgtttgaagttttggtgtaattggtttcacagcaatagaaagcattacacaaagtgtctttctaacctgaagactcagaaggtcttgggtttcctgtgggtaattgttctggaaaccaaggcaacaggacctagggccaactaatttctcccagttactagccgtatgacctcatggagaggacttcacctctctgtgcctctgcttccctacctgtgaaatggagatataactaacaactaccttcacagggttcccattgtccttcctcctacctggaaactgacactctctcaaccagggtctccatcaccgcctggttctctgtccccctctttccagttctctgtccccacccagcccctgtgtctgttccttctctctctgggtctctatccccctcctctatttctggtcttctgtctcaccctgattcagctctgtcccccaaatctcagagtctctgacttatttttcctgagtctctgcctttctactctttaggtctctgtcttctttttttttttttttttttgagatagagtctcactctgtcaccaggctggagtgcagtggcacgatctcggctctctgcaacctccacctcccgagttcaagcgattctcctgcctcagcctcccgagtagctgggattacaggcatgtgcccccctctgtctctgggtctctgtcctcctctctctctgggtctctgtcctcctctctcttggtctctgtcccccactctctgggtctctgtccccctctccctggtctcccttcccctctctctgggtctctgttcccctctctctctctgggtctctgtctccctctctctctgggtctctgtgtccttctctctgcctgtccccgccttctctctggatgcagctcaggtgctgggtgctggttccagctcctgctgcccccctcacctctccagcaggcaccccaaggtcattactttttccatttcacagagaaggaacttgaagcccgttagaggccgacactcccctgcagccccacagcgagctggcagctgtgtcagaccttgatcctggctgcctggggtactttctcaggcttcacgatccagtgggggatgtgactcagaaatagctctggtgggaggcaaacggctgcaagtgctgcctgagggacactccccaagacagggcggagagctcttctgtctgagggaggagatgtctcccagacatccttcccagcccagactctttgccctgttctctgcagctcctcctccttccctggaccctcgcccaggctcccctctggcctccctgcctcagtctctcccctccaaacatcccccactcagcccaagggagtcttggggagagaaagcccttttgcattagtgacaaaagcagcagccttcttgtcttggtcctgcttcttacaacccctccaaccttgaccttgtggaggttactacaccactgtctaccttagttgtttcttttttttttttgagacggagttttgctcttgttgcccaggctggagtgcaatggcacgatttcggttcactgcaacctctgcctcccaggttcaagcgattcttctgcctcagcctcccacatagctgggattacaggcatgtgccaccacgtccggctaattgtatatttttagtagagatggggtttctccatgttgatcagcctggtctggaattaccgacctcaggtgatctgcctgcctcagcctcccaaagtgctgggattacaggcatgagccacgaagcccggcctcaaatatttttttaaaaaattagctgggtgaagccgggagcggtggctcatgcctgtaatcccagcagtttgggaggc[134 bp omitted]gaggcagaagaatggcttgaacctgggaggtggaggttgcagtgagctgagatcacaccactgcactgcagcctggcaacagagcgagactccatttccaaaaaaaaaaaaaaaaaattacctgggtgtgtggcatgtgcctgtagttacagctactcgggaggctgaggtgggaggatcacctgggcctggggaggccaaggctacagtgagccaagattgtgcctggactgtcatgctgtcactccagcctgggcaacagaacaagacccagtctcaaaaaaaaaaaaaaaccgaaagaaagaaaaaaatttgtttagctgggcacggtggtgtacacctgcagtcccagctacttgggaggtcaaggtggaaagatcgcttaagcccaagggtttgaggttgcagtgagctattatcatgccagtgcactccagcctgggcaatagagtgagaccctgtctcaaaaaaataaaataaaataaaaagaaagaaaaagagaggccaggtgcggtggttcatgcccgtaatcctagcactttgggaggctgaggtgggcggtcatctgaggtcaggagttcgagaccagcctggccaacatggtgaaaccccatctctactaaaaatacaaaaattagtcaggtgtggtggcgctcttgtaatcccagctacttggaaggctgaggtgggagaatcacttgaacccaagaggtggagtttgcagtgagccaagatcgcaccactgtactccagcctggctacagagtgagactccatctcaaaaaataaagaaaggaaaagagatatttgttaaaaagaataaatgtggctgggcatggtgttgcactcctgtaatcccagcactttgggaggctgaggcccaaaaattgcttgagtttaagaccagattgcacaacattgtgagaccctgtctctacaaaaattattattattgttattattttttttttgacagactctcgctgtgtcgcccaggctggagtgcagtggcgtgatctcggctcactgcaacctccgcctcccgggttcaagcaattctcctgcctcagcctccacagtagct[200 bp omitted]caggtgtgtgcctgtggtcccagctactcagaaggctgagatgggaggatcctttgaacccaggagttcgaggctgcagtgagttgtgattgtgccactgcactccagcctgggagacagagcaagaccctgccttaaaaataaataaacaaaagctgggcgtggtggctcacgcctgtaatctcagcactttgggaggccgaggtgggcagatcacctgaggtccggagttcgagaccagcctgaccaacatggagaaaccctgtttctactaaaaatacaaaattagctgggtgtggtggcacatgcctgtagtcccagctactcgggaggctgaggcaggagaatggcttgaacccggccgggaagcagaggttgctgtgagccaagatcacgccattgcactccagcctgggcaacaagagcgaaactctgtctcaataaataaataaataaataaaatttaaaaataaaggaacgaatgtatgcatctccgttttacagatgaggaaaccagggctccctgaacatagaaagtgctagtgaatcttatcagcatcattaagatcatggctattgttaatgtggttctcagtatctggtagagcctgttttaggcctggcccaggggaagccaggtggggggtgaggatcagaggtgcagtgagttaaaggacccatttgtaaccctctatacttttgccagaaattccctaagtccccctaaatcttgctcatctctcagttttgccccagattcttagctgactcccctcagagaactcctactcactcactaaggtccagttgcaagacatcctcctccaggaagctttccctggtaccccccagcctggcttgaggggcctttctctgggatctcctccgttagggaatttctcaccctagtctgtgtcttttgcccccaccagactgggagctccccaagcacagggatctggcctgtttcctgagcccagcctcactggggacatttgggagtgactgtgtgaactgaagaccacccaggccaggcacgggggctctcgcctgtaatcccagcactgtgggaggccgaggtgggaggatcacttgagcccaggagtttgagaccatcttgggcaacacagtgagactgtctctaaaggaagaaaaaaaaaagaccaactcccagattcatggctggctgtcagagaaggaggaggcagttcccagttagttcctctgggtctcgaatgaccagaacattctaactccaagtcaaaaacaccccacccccgtcctaagtatttgctaccaccttgtggaggacctcggtcctccccagcgggtggtgtggagggccctcaccaggatttccgtgatgtctgcgtcatccggatcccagggtagggtaggggaggcagggggcccagccagtgtgagttggccgctgaggtcttccactgtggagtctgtccccgtggagtcagtgggctccatggcggccaggttgagcagtgacacgttggtgcaggccgaggaccgtttgaggttcaggcaccagtgcatgggctgatgggacatctggggctccaccctgcagagaagaaacaggcagaaaagtggagaagcagccccagggtgtctgggccctcctgccttcctttctccatacctcaccccctgtgactccaccctcactgtatataagtttctcccttctctgtccccgctgcctactttattctccttccctgtgctgcctactttctttcttttttctttctttcttttttttttttttttgagacagagtctcactctgttgcccaggctggagtgcagtggcgcgatctcagctcactgcaacctccgactgcgggtcccagttcaagcaattctcctgcctcagcctcctgagtagctggggttataggcatgtgccatcacgcccagctaattttagtatttttagtagagatggcttt[144 bp omitted]ttctcctcccttctctgccacctactttcttcttcattcactagcctcccttctccttcttccctccccactggctttttcctctctccatccatccccattaccttcttcctccctccatccatccccattaccttcttcctctctacctccctgtgacttgatgtctcttcactgctgccctctttcctgcccccgacctgctggcttttccccctccccttcctctagcacccacagtcggactcctgctctgttggaggtagtgctgggcattagaaccatccctgacagtgtgcaacaaacccacccgtggaacgacacggccttctttttcttcgggatccccttggcccggctggtcaccctccggggagcctctgggactagctgggagcagctctccacccccgtgggggtgtccccggcctcatggatctctttggactgccagatcgtcttcaccaccacgctcgccatggtgtgggggtctggctcccagggaggggctccttcctctgagacttcctacctactgtgaccacagaccctcaggatccactgtcccctcagcctgcctcacaaaggacccaaccactgggccccagtgagtggggggcacagggtagggagagatgctggcccaggtcattcccctagggttctcagtggactcctcctgttcaggattctagttacatgcccaatgtgccccccgtcttcagagctccagtggatggattcatgctagcctgtaacttaacaatgggtcggcccacggattcttgggagaggtccaacttccctctccctgagactaagcgtggggtcacacagccctgtgcacttgttcttgattcttcatgtagcttcctggatttgacaattggctggggtttgagagactgtggtcgaagagggctgagatccagaccctgacctggagggtctcatattctatggggcgtcggggtcgggggaaaggcaatatacaggtagatcaacaaaagaaagctaggtgcggtgggcctcggggtcagggtagaaggtgagggaggagaggaaggtagagagttggggcaggacagagggtggtatccccctcccccgtttatttatttattattttctttaatactttttattttttttgagacagagtctctctctgtcatggaggctggagttcagtggcgcgatctcagctcattgcaacctccacctcccggggttcaaccgattctcctgcctcagcctccccagtagctgggactacaggcgctggccacaatgtccggctaatttttgtatttttagtagagacgggtttcaccatgttggccaagttggtctcaaactcccgacctcaaatggtccacccgccttagcctcccaaagtgtgggattacagacatgagccaccatgctccgctataattttttttttttttttttagatggagtctcgctctgacacccaggctggagtgcagtggcgtgatcttggctcattgcaacctctacctcccagtttcaagcgattctcctgcctcagcctcctgagtagctgggactacaggtacctgccaccacacccatctaattttttttttgtatttttagtagagacagggtttcactgtgttggctaggctagtctccaactcctgacctcgtgatctgcccacttcagcctcccaaagcattggaattacaggtgtgagccactgcgccccgcccgcccaaagtatttaaaaaatatatggaacatgtcacaaatttgcatgtggtctttgcgcagggcccatgctaatcttctctgtatcgttccaatgttaatacatgtgctgtcgaagcgagcactgccctgctatttagggacagacttttcctgttctcttcacacttctcaaaaagactagttcaaacatcactgctaatagacattttaaatgctgttatccccagggagaaagtacttcttcctggtcatgaatggactccagttcttggaac[135 bp omitted]acactgtctctacaaaaatacaaaaattaggcgagcatgatgacgggtgcctgtaatcccagctacttaggaggctgaggcaggaaaatcgctttaactcgggaggaagaggttacagtgagccgagattgagtcactgaactccagcctgggggacagagagagactctgtctcaaaaaaaagaaaaaaaaaaaaggccgggcgcagtggctcacgcctgtaattccagcactttgggaggccgaggtgggcggatcacaaggtcaggagatcgagaccatcctggctaacacggtgaaaccccgtctctactaaaaacacaaaaaattagccaggcatggtggcgtgcgcctgtagtcccagctacttgggaggctgaggcaggagaatggcgtgaacccgggaggcggaggttgcagtgagctgagatcgcgccactgcaccccagcctgggcgacagagcgagactccatctcaaaaaaaaaaaaaaagaacttcaagtcctgggattaataatttttcttgtgtttaatggggctgctttatgttcttcaggggcaaacagcacccccctcccatattagaaatggactctccctgtgactaaaacagctgagcaatttctgtcctcctggaatccaaaatggactttcccaggccccattcctggaaacccaaatggacgcatccattgagcctggaaggtgggctcttctcaacctcctttccatctcccaggattcagaatggccattccaaaggtccagaacacacccccaaggctcattccaggaattcttggcttctgagattagaaaaggctgatggggtggagttttgttcctacaggtgacagaaatggactcttccagttccctttgtcccaaatttctcaatctcctggggcgttgggagttctggccgttttgccttccccaaagccagtttaccaaagagtctctggggagctgggggttggggatggaggctggggctgggccaaagcagattcacctatttcttcttttaacaaatgttgttgaaactgttcaaggccaggtcccattcttgcccagaaggagttcccagtctggaggagacaatcaattttggtttgatatctgctacaatggaggctgcccgagagacactgcggttggacaaaaaaaaaaaggcaacatatattgaaaagtaagccaagatacggtttacgtttatttctgctttttcacttccaagctgtgtggccctgggcaagtcattcgccctctcgacctaagttttaacttctgcttaatgggactagccttgaattactgtttttcactctgagattctaggtctcctgacaactcaagtcccgacacgttggctgcagagaaggggggaggggaggaaggcttcctagaagaggatttcagcagtcgggggtgacagtggagggagaaagggaacacggagacgcttgcgcagtaaacaccgcacgctctcttgcctcgcccaaccccttctctgcagcagggaattgcaggcgtcgctccacctatcccagccgagcggagtgacaccctcccctctttccttctctactgatcttcgccttccgcccgccccacagccgcccaatggagggctgaagtaggacagatctcgccaatccgcgacgcctgcggggcaggtctacccgttcattggtcccagtcaacctaagtcccgcctcctaggaccgttccccgccttccttcacgtccctcccttcctccttggagagccgctagatccaatcagtgtttgacctggccgcgcggagggggcgggcccatgatacgcaatcgaaccccgcccgtctctcgggcaacgcctcctcccccccctccccagctcccaaacggaaatagcggaacactgggccaatcgtagcgtcgtgcctttgcttggcggccaatgagagaggaagtgggggagaaacccgcctgtgagcggcaggagctcaagccagtgggcggctcagagctccggaccgcgggcggaggggaggggcagggggcggtgccacggcctgccagcccgcccgcccgcccgccagccagccctccccgcggccggctcggctccttggcgctgcctggggtcctttccgcccggtccccgcttgccagcccccgctgctctgtgccctgtccggccaggcctggagccgacaccaccgccatcatgccggccgtgtccaagggcgatgggatgcgggggctcgcggtgttcatctccgacatccggaactgtgagcgcgcggccgggggacactggagacgcgggggaggggggagcgtgaaattgaggggtttggggatcacagagggacccgggggatcaaaagcctctgcggccgtatagggacagcatagatgggccccaggaagaactttagagtggggggcacgtaggggcttggggtgtcatagagtgcctcttgaggtgacgacacggagtagctagaggggtccgggagggcttgaaaggggaggaagccagtgaggtcccggggatgggagcatagaggtgtcccctgggaaagactgaaaagctgggggatcttacaaacgatggggttagagggattcccaatgtagagaagaagtgaaagaagtgtatggcgggggtgccctgtggagcgatggaatgggaagaggccagaggggacctggaggaagtggaatgccggaagcctaatgaagcagggcttgaggacctgggatagggggtgtcatacaggggaaaggggttagataggtcaccgaggctcctggccagtggtatagaggaggcctgagagtggttgaaagtccatgagtttggggcagggagatgatgggacggggagactataaggacaccctggtgaaggatagaggggcttcagggtgggagattgcctagaagacatggaaggcagtgtggagggggctagaggggcagctgaggggaaaggagggacccaaggaacacagaggaaaagagctgtcggtgtaaggtcttgggagaacctgtgacagggaacggggggccaggaaagaagaggacattagagtaggggattggggaaagggtagaagaaggagcgcccagacctcaaggaaggcgttgggttctgaagtgcttgaggggtagatatctggaaagctgggaataggggaagtctaatcccagagagaggtcaggggtcaggcagcaggacaggcagggatctgagcccttttctatttgaccacagtaatatggggacggtggtccctgccaggaagagttgtcgtgacgatgggaatcctggcggcaagtcagctctcaactcctgggaatggctgtgggtgattggagctgccaggagtcttcagaggctgcatccgcatgggctctggggtcagccagacttgggtttgcgtttgagcactgccactccctggctgtgtgaccttgaatgagggacttcacctctcggtttcctcatctgtcaagagagactgctgatagtatcttcctgaggggcttgtgacaatgcccctcaggcctttcactcgttccaggccccagatggaacttggctattgtttttactccgttggctctgaacagcagccctgtaaagtacccagtgatggttgttgttttagaatttaactgttatggaaggatctggcatgtaataggtgctcagggaacaggagggtggaaacagttgagtatcagttggaggagaaatgatcacttgttatgataaggggcggggctatgggggttgtggaggagctgggagccactgttagcagacgggggctgcctctgttacccaccagggatgtgaccctccacgagttgtttaacctctttcaggacgttttcttgtctgcaaacttcattcataacagtgtcttgcctctgaaggctcatttattcattcattcacttgacaaatactttttgattgctctagtgttgtccaggccctgttctaggtactggggtgacaatagtgaacagaaattcctgttcttgctggtcatggtggctcatgcctgtcatcccagcactttggggggccgaggtaggcggatcacctgaggtcaggagttcaagaccaacctggccaacatggtgaaactccatctctactaaaaatacaaaaattagccaggtgtggtggtgggtgcctgtaatcccagctactcaggaggctgaggcaggagaatcgcttgaacccgggaggcagaggttgcaatgagccgagattcacaccattgcactccaggctgggcaacaagagtgaaactccgtctccaaaaataaaaaaaaagaaaaagaaactcctgtccttgggagctcccttccccgaggaagacagaacatatgcacagggaacaccctgatatacaacctcaggacctgactggttctgtgaagaaaaataaggaggaaatggtcgggagagggactaggatggagagggtactcagtaggcctcgtggaggaagtcatatctgagtggagcaagccctgtggattttggaggaaaggggtcctggcacagggaggtgcattcagaggtcctgaggttgcggcatgcttgacatgtgttcgagcgagagggagaaggtcagtgtggctgaagctgtgggagtgaaggggagagagggcgggtgtggaggggagtgggaacaggatcgggaaaggctttctgggccatggtgagcactttggcctttgtctgcatgagaatattttgagcaggggagggatgtgaccgattgatgttttaagataattcctctggctgctgtgagaacagattctagaggtagccatggaagcagggaaccaaattaggagggtgttgcaggcctctgggtgagagatggtgctggcttaacagggtgagaagggactggtgagaaatgggttggtgatacatttttttttccgagacagtctctgttgcccaggttggagtgcagtggcacgatcatacctcactgcaacctccgcctcccaggttcaagcaattctcgtgcctcagcctccccggtagctgggattacaggcacccgccaccacgcttggctaatttttgtatttttagtagacgcagggtttccccatgttggccaggctggtctcgaactcccaacctcaagtgatctgcccgccttggcctcccaaagtgctggcattataagcgtgagccactgcacccagcctgggatacaacttgaaggaaaaactgtcaggatttgcaaagggatttgatgatgggggttggggaaggaaagagatcgtcccgtcactgcaggaccccagagacgagccagaggacagaggggagatgcaggcttggggcactggtagtaatttagccacaggaattagggctggagaatcaggagccttttcttagcaagcgtatgttgaacggctggtatgtctcaagaattgtgctgaatgctggggacactggtgaacaggacagacttgtccaccccctccatgaagctcccagccctgtgggggagaaggtgcaacatacaaattgcagtagtccttcacactaatacctggacacggatgttcactgcaacattattcatgatagccggaaaacagaaacgggccaaatgcccatcaactgagaaataaagtgtggtctatgtagtggaatattaccgggccttaaaaaataatgacgtcctgctacatgctgccacagggatggaccttgaaaacatgacaccaagtgaaagaagccagacacaggaggccacgtgttgtatgattccatgttgatagagtatcttgaataggcagatccatggagacagaaagattagtggttgcctagagtaggggctggtgggatggggagtgactgctcatgaatgcataggttctttttttattttttgagatggagtctcactctgtcgcccaggctggagtgcaatggggtgatctcggcttactgcaacctctgcctcccaagttcaggcgattctcctgcctcagcttcctgagtagctgggattacaggcgtgtgccaccacacctggctaatttttgtacttttagtagagacggggtttttacatgttggtcaggatggtctcgaactcctggcctcaggtgatccactaccccagccttccaaagtgctaggattacaggtgtgagctaccatgcccggcagcattcagagcttcttttgggttcatgaaaaagcctacagctggacacggcacatgcttgtagtcccagctacttgggagactgaggtaggaggatcatttgaacccaggagttcgaatccagcccgggccacatagtgaaacctcatctcttaaaaaaaaaaaaaaaaaaaaaaagaaaggtcctggaattcgatagtagtaatggttgcacaacatcatgaatgtactaaagaacgctgaattgttcactgtaaaagggtcaattttatggtatgtgaattgtatctctttttttttgtgacagtcacaaaaatggcgcgatcttggctcactgcaccctccatttcccaggttcaagcgattctcctgcctcagcctcccgagtagctgggattataggcgcccgccactatgccccgctgatttttgtatttttagtagagacagggtttcaccatgttggccaggctggtctcgaactcctgatctcgagtgatctgcctgcttcagcctcacaaaatgctgagattacaggtgtgagccaccgcgcctggccgtatctcgatttttttttaaatggggaaagaatttgcagctgtcctaagcccagtgaggaagagggccatggtgttgagagaatggggattctgtgtggtcagcgagctgcggcctggctttgcttcacaagagacctttggagctgtgtgggcaggaagtaggggagttacctaggctgagggcagtgagaagagctgtgaaggcagaggcggggcaagtgcaaaggtcctgacttccggacgccatggcgggcatctctatctagtcccagctactcaggaggtggaggcagaaggattgcttgaggccaggaatttgagaccagccttggcaacatagcaagaccctgtctctctttcttttttttgacagagtctggctctgtcatcccggctggagtacagtggtgcgatctcagctcgctgcaacctcctcctcctgggatcaagctatcctcccgcctcagcctcctaagtagctgggactataggcacatgccatcatgcccagcaaatttttttgtatttttc[137 bp omitted]atgttgcccgggctggtctcaaattcctgggctcaagtgatctgcctacctcggcctcccgaagtgctgggattacaggagtgaggctcagtgcctggcccccttctctattttcaagaattcttttttttttttggaaacggagtctcgctctgtcccccaggctggagtgcggtggtgcgatctcggctcactgcaagttctgcctcccgggttcatgccattctcctgcctcagcctcccgagtagctgggactacaggcgcccgccaacacgcccggctaattttttgtattttttttttagtagagatggggtttc[143 bp omitted]gtgagaccctgagaaaagggctgtgtggctggtgcagagagggatgggatctgacgctggggagtgggcagaggctaggtccgtgtttgtcctgagagctctggagaaggtttcaagcaggagcgagggaagagaagggcggagggatgcggaggaggaggtggggagaggcagggctcagagagcagcagagggaagagtgtggagccagccagcaggaggatctgaagggcacagtggggctatggggaagggtctagaaggtgaaaggcaggctctaaggagggcagggagggcaaattctgcagataaggagggggagaggttgaggctgggcccagcccgagggcgtgttctgtcctgtctgcagcaggaatacagcagaagtattatctcacagggagcaagggctggggctgcctcctatctaggcagagtctggctggagtgggccttaggagagttggacgagtgagccaatgggagcggggtgctggctgcacactgccctgagctcttccatcagagcacatcccactccaaatggtgatccactgcagtggtgacatcgagcccaggccctgggtctcactccagctttgtcctctgtaggttctagcccatgggaggcctcaggagatgattgccagttgaatgaatgaatgaatgatggaaccagtctttcttgagttccagctgggtgccaggcactgttctaggtgatggggctacagcagtgagcagaagttcctgccctagggtgctcacgttctagagaggagatggtccactacacaggtgaatattttgggggccggacaggtgggagtaggtgttgatggaaaatgaggcaaggaaagggcttggggatggagttaaggatgatgctcttatataggctggtcagagagtgtcgctgaaaaggtggcattggagcagagaatctaactaagtgggggaatggtgcatgcatgactctggaagagggagctgcctgtgcaaaggccctgaggcaggattgtgcttgtagtggagcagggacttaggaggaggagagggcagctcctgccttggagagagaggacaggagaaccggccagagagggaacagggtagatggtgcaggcccttgtgggctgcagtgagaactttacttttacttcgaacttgctgggagccatggaaggggtttggaggagtgctggggtctgactcaagttttcacatgatccctctggcctctgtgaagagcacaggaagtcaaacagatttcaatttggtatcccttaagaacgggacagatgcaggcctgagccccagccccacccgtttccagctggttattgtgtgatggctttggtccacaaatccgcattcaacacctcccctgtgccaggctgccctgggccctgggaacactgtggggactgaagcagccgtacatccctggcctcatggcactggtgttccgatccaggaggaaatgaacatgcaaacccttaatatgtaaggaggcaactcaggcagggtcttggtggcccaaatagttcgccctgctgagcaggggggctgaccaggagaatgagagggtttgattttgttatttacgaagaatatattttcatcacccaggaatagtgatgaccttgagaatatgagtggtgtaacccagcaccaaaatgcaagccatatatatgttgaaattttcttttttttttctttttttgagacggagtcttgctctgtccacgcccggcat[143 bp omitted]aactccgtctctactaaaaatacacaaattagctgggcctcgtggcacacctgtagtcctagccactcgggaggctgaggcaggagaatcgcttgaacccaggaggtggaggttgcagtgagccgagattgtgccactgcgctccagcctgggtgacagagagagactttgtctcaaaaaaaaaaaaaaagcaaaacaggctgagcatggcagctcacgcctgtaatcccagcactttgtggggccgaggcgggcagtttggttgagcccaggagtttgagaacagcctaggcaacaagatcctgtctctccccaccacaaaaaaacttttaaaattagccacgcatggtggcatgcacctgtagtcctagcttcttcggaggctgagatgggacgatcgcttgagcccaggaggtcgaggttgcaatgagtcaagatcgcaccaccacactccagcctggacaatacagcaagaccctgtctccatatattttttaaaaaagcaaaataatcagtgaaattcattttaatatattttctttaccctagtatatccaaactattatttcagtgtgtaaccagtgttttttgagatggagtcttgctgtatggcccaggctgagtgcagtgtcaggatctcagctcactgcaacctctacctcccaggttcaagcgattctcctgcctcagcctccctagtagctgggactacaggtgtgcaccaccatgcccggctaatttttgtatttttagtagatatgggatttt[132 bp omitted]ctgcctgtctcagcctcccaaagtgctgggattagaggcgggaggcattgcacccagccttcagaaggctttctgaggattcagggctgctggggcttgtacaggaagcacatcaggtctcggtctctgtagaggaaatgtccttggtctagaaggctctgaaggcctttgcggtgagatgctgggtgatgcctgtgttaccttcataaatgcacattagtccctccagggcagggcccaggtttgacaggatgcctttgctggtagtaacagacccaccctgatctggggcttacatgtttagggaaggcgttatctcccctaaccagaagctccaaggtaaggcagctccctggccccgtcagcacttcccttgactctgccttactctgcctggagcaagatgttggccgccttcgcacccgaacacccctcacggcaacagccactggacggagcacggcctgcccctcccatggccccccccagcacctcagaaaactctggagaggctgcgtggtctggccccacctgctgtgctcttctccacccgcccccgccgccgcccgcatcctcagactctgtgcctctttcatcaccgtccgcctgccttgcctcatgctgtcctacctccaggccattgcacctgctggtcctcctgcctggagcgcgcctccccttgtttctgcctggtccatttcagcctcatcttttgatcctcagatcccagcagctgtgtgcagagaagccttccccgtcccctgcgccattctcattttagcctctcagccccgaaatgtgtatacctctttcagaatacttgccactgtccctgtctgccaccactccaatccagggatgcctcgagagcagggtagatgtgactcatccttaagcctggccccagaaatcccattgtgaatgagagaatccctttaaaactctctcacaggcttgcttgcctcctgtgacagtgagctcattccccctgttgctggccctgaatgccgggtcattcttcccatgatcctggtctgtcagagctgcctcagccctttccccaggcaccaccccagtagcacccatacagtatccctgggctccctggccatcacgggcctttagatctttgcagagctgggcctctgccagagccctccctttggggccacaactgctcctgttttgaagaccgagagcttttcttctctctctgaattcctttttttatagcaaattataccagttatgcagaagatagcatcaaatagatgtggaccatttaaagcctatttaaaggccaggtgcagtggctcatgcctgtaatcctagcactttactttgggaggctgaggcgggtggatcacttgaggtcagaagttcaaaaccagtctggtcaacatggtgaaaccctgtctctactaaaaatgcggaaaaaaaaaaaagccaggtgtggtggtgggtgcctgtaatcccaactgctcgggaggctgaggtaggagaatcgcttgaacctgggaggtggaggttgcagtgagccaagatggtgccattgcactgtagcctgggtgacagagcgagactctgtctcaagaaaaaaagtaaaaataaagcctatttaaagaaaaatatacatatatatgcatatttgtatatatatgtaaatacattttaaatacaatttaagtaatactttaaaaagagatttccagccgggcgcggtggctcatgcctgtaatcatagcactttgggaggctgaggcgggcggatcaccaggtcaggagattgagaccatcctagctaacatggtgaaaccccatctctactaaatatacaaaaaattagccaggcatggtggcgggcgcctgtagccccagctacttgggaggctgaggcaggagaatggcgtgaacctgggaggcagagcttgaagtgagcagagatggtgccactgcactccatcctgggcgacaaagcgagactccatcacaaaaaaaaaaaaaaagatttcctggcagtaagcggtggcccatgcctataatcccagcacttcgggaggctgaggtgggcggaggagttgagaccaccctgggcaacatggcaaaaccctatctctacaaaaaatagaaaaaaaattagctgagtgtggtggcgcacctcacagtcccagctacctgggaggctgagatgggagggtcatttgagcccaaggggccaagactgcagtgagctgagatcaaaccattgcattccaacctcagtgaaagagtgagaccccgtctcaagaaaaagagaggaaatctatatattatagatataataatatgtatttctttaaatgaatactagttaaagaaatacgtaaatataaatatataagtacatatgatatatatttctttaaatttaaagaatatttaaagaatacatatacatgcacatatttgtgtatatatttaaatcatttcaagtacaattgagtgaatacactcgtgtattaacgatggggatatgttctgagaaatgcatcgttaggtggttttgttgtggtgtgaacatcctggagtgtgcttacacaaattgagatggtatagcccaccactcactgaggctctgtggcgcagcttgttgctgctgggctgtaaacctgcacagtggccaggcgtggtggcttacacctgtaatcccagcactttgggaggctgaggcaggcagatcacttgaggtcaggagtttgagaccagcctggccaacgtggtgaaacctcgtctctactaaaaatacactaattagctgggtgtggtgacgcatgcctgtcatcccagctactcaggaggctgaggtaggagaatcacttgaacccaggaggcggaggttgcagtgagctgagatcacgccattgctctccagcctgggcgacaagagtgaaactgcgtctcaagataaaacaaaaaaacctgcacagcatgggactgtcctgtaggcaaccgtgactcagtaagtatttgtgcatctaaacatagaaaaggagcagtcgaaataaggcattagaatcgtatggaaccactgcagtgtgtgcggtttgttgctgactgaaatgttgatatgcggggcaggactgtattgaaataatacatattatttaaattaagtaatacatatatttaaataacacatattctttaaatatgtgtatactctttatatatactatatttatggtatgcatatgtatatatacgtatttatgacaaaaccatatatatataggccaggcatggtggctcatacctgtaatcccagcactttgggtggctgaggcaggtggatcacttgaagtcaggagttcgagatcagcctgggcaacatagtaagacctcattgctaccaaaaaaaaaaaaaaaaattagggctgggcgaagtggctcactcctgtaatcccaacactttgagaggccaatgtgggcagatcacgaggtcaggagattgagaccatgctggctaacatgctgaaaccccatctctactaaaaatacaaaaaattagctaggggtgggtggcaggcgcctgtagtcccagctacttgggaggctgaggcaggacaattgcttgaacctgggaggcagaggttgcagtgagctgaaattgcgccactgcactccagcctgggtgacacagtgagactccgtctcaaaaaaaaaaaaaaaaaaaaattagttgaatgtggtgttatgcacctgtagtcccagcgactttggaggctgaggcacaagaatcactgaacccaggaggcagaggttgcagtgagccgagattgcaccactgcactccagcctgggctacaaaaaaaaaaaaaaaaaaaaaaaacagaaacaggcaaaattaattttaataatatgtctctataacccagtacacccaaattattatttcagcatgtgatcaatactttataatttgtattgttttatttagttgacacacaagttctcactgtgttgtccaggctggtctccaactcctgggctcaagccatcctcctgcctcacatgcgtgagccaccacgcctagcccctataatttttactgaaatattttacattttttctccacactgtcttctaaatcccgtgtatgtttgctgttgacagcccctctcagtttggaatggccacatttcaggatctcaggagccactggctggcaactgctatattggatggtgcagcgctagggtcctcttagcactgatcaggaggtgctaatcagaggggcttcctggaggaggtgatacctgaagtgaggcttatgggagcttccatagaagttgggagcagggacaagacaggatttctagagagaaggatggcacatatacttgctttctcagtcattgactcatttgttgaatgcacaccccaccctgctggggactacgccctgaaggatgtgggtcagagcagatctctgccccttccataactagacatttatagagcacctgctgtatgcagggcactgctctaggagctccctcctgatgcttacagtctgaagtgggaggaagttcgacagtggagagaaataaaattgtgacatggtgaaatgtaccagagaggacttcttgaaaaataactctttaagcagaataataaagaattgactttaaggaagtgaaacggaacggcctttcaggggtggcaggagccgagacccaaatgatgggaagatgacaggggaggggtggccccaggaagagggcacagcttgtgtgaaggcccttgaggcaagaggatgtgcgtgttcccggagcaaaatggaggccagggggcctggatggacagtaggggtctgaggggtgacaccggcagggttgctgtgacaggggcagaggacttgatgggccgtggagtggagcacccccagctggcatcacagagcccaggatatggaaacacgagggaggcaagaaggctggaggggaggctgcttcactgacctgagcgagcgagcatgggatctggatgaagtggtcatcgtggaggtgctcaagacatgttctgaaggtcaagttaggaggaggtggctgggcacagtggctcatacctgtaatcccagcattttgggaggctgaggtgggaggatcgctggatcccaggagtttaaggtcacagtgagctatgattgcaccactgcactgcagcctgggcgacagtctaagaccctgtctcaaaaattaaaaggacgaggcagtagcccgattggcgtgaggatgtccaggttctgtttggaggagaagagggaacggtagaacctgtcaagggagggatgaagtctggggtgagtggaacagggacaggagaagcagagagggcagccgagagcatccagtcggattgtgctctgaagggggtgctgtagggcattgaggagcatggaggaagcagagacctggcctgcaggatcaggggaggctttctgtgcttattccacaagcaggtcctgtcagaggtgtaggaatgtcccagacaaattggggagaggttggcagccagagaacaggaggcagtggggacaggccacgcgggagaggacaaagccatggctgtggggacaaagggggtgaggacagcacccaagggtctgacctggtgactgggtggacagtgggaccttcatgggattgagaactggaagaggcagtgagctcagtggtaggggtgagcaccctgcggccagccaagctctttattcattcattcattcatcacatgttcatcgcatgtggggagtggggacaggagctctcagggagcgtgtctggggccctgaggagccccacaaatcaggggccacagtggtaggaggaaggagagaggaagtcagggacagcccaagggtgtgtgctctgtgctgtggggctcagccagcggtggttcttccctctttgaaactcccagccagagaaggggtcctggcctgtcctgagccccagggcttgggggcggagaagatctgcccttcctgctgggtggggccgcgcctaggaaagagagggcaggtggctgactccccagacccctcactgcctaccctcctcctcctctcccaggtaagagcaaagaggcggaaattaagagaatcaacaaggaactggccaacatccgctccaagttcaaaggtaggctgggggcccaacttctggttctgagggaggagggggctgggagctggggctcctgtgacctatcctgtgacccttccttatttctggctcccctttcctccttcctctgccctaggagacaaagccttggatggctacagtaagaaaaaatatgtgtgtaaactgcttttcatcttcctgcttggccatgacattgactttgggcacatggaggctgtgaatctgttgagttccaataaatacacagagaagcaaatagtgagtctggagaggggggtgccagggcctggactcctgggtctgcgggggagggggctggaggtctggactcctggatctgggggaggagggggtctaggggtctggactcctgggtatgagggaggagggggtctggggctctggactgctgggtctgagggaggagggggctgggggtctggactccccattctgagggaggagggctggaagcccagactcctgggtctgagggttgaatctggggcctggactcgtgggtctgagggaggaggggcctgggggcctggacttgtgggtctgagggaggaggggcctgggggcctggactcctgggtctgaggttgaatctggggcctggactcctgggtctgagggttggatctggggccactcagtcacaaggctcctagccatccacgacctccctccccacagggttacctgttcatttctgtgctggtgaactcgaactcggagctgatccgcctcatcaacaacgccatcaagaatgacctggccagccgcaaccccaccttcatgtgcctggccctgcactgcatcgccaacgtgggcagccgggagatgggcgaggcctttgccgctgacatcccccgcatcctggtggccgggtaaggcactggggacccgttggcagtggggggcctgggggtgatgagtcccagccaagtgtgaggctcagagaggctctgttgcctgcccaaggtctcccagccgagatgtgggctaacgctgggctggggacccagtggttccggtggcagccccatacttgtctcttcccgtgatacgaagctgacttgatggtgtgaggctgctcccggcaaagccagtggggtgtttctgaactgcagaattctaacacctacgataagaggcgtaactgtgctatgtgggtgacggccctccagaacttcctcatcttctccattcattcaccaaacatttactgagcacatactatgtgccaggcactgtgctgattgctggggatgttgtattgtccagagatggacacggtcattgccctcctgtgttcatggtctggagcaggagacaaatggtgatggaagaattgcaggatgaagtgtagaatttgccaggtgcgatggctcatgtaatcgctgcatttggggaggctgaggcaggtagattgcttgagtctaggagtttgagaccagcctgggcaacatggcaaaatcccaatctctactaaaaataccaaaaattgccagggcatggtggcgtgcacctatagtcccagctactcgggaagctgaggtgggaggatctcctgagctggggaggcctaggctgcaatgagttgtggttgcgccagtgtactccagcttggtgtgcacacaggtgagacttctatttctggcagtgtggtcagctagatacccgactcatgttctccctgaaacctaactgtcaatattggataaaagaggaaagacaatattatttaatggattcatgaggtagccagaaaatgaggagcacacaggccacaagctaagagaagccgggcacccaagcagatgagccgcgtgctggagccagcatttgcttagaaggcatttgctgaactgggtgaacccgagtatcggttttggggccctgcagcctctgggaacagaagacaaagcttgtccgagaagttctcgaaggctgtacttcaaagtgagagtgacctagaaataaacccccttggggactatgaggaaaattacctgtctgaaacgttggcacggagcagccctcagactggttttcagcctgactttaccctatctgggtagtccaaaagcccctaagtcaacctttagtttaaagtgatggaaactggaggttccctagtgcttcacagaagcaaacacgagccttttctgaggaagcccattttcaccacaagcttcagtgatatccacagataaagctccaaatgatatgagtagctcacagccaaaaatctctaaacacatgacacaa[133 bp omitted]catggcgaaaccatatgtctactaaaaatacaaaaattagccaggtgtggtggcacatgcctgtaatcccagctcctctggaggctgaggcaggacaggagaatcacttgaacccgggaggcagaggttgcagtgagccgagatcatgccactgcactctagcctgggtgacagagcaagactctgtctcaaaaaaaaaaaagaaaaagaaaacagaaaataactttggaattggaattatacagaatgtaaaagaagtatatttcatatgtttcaataaataagagaagcattttaaaatatgagtaaagtttaagcagatttgaaaatataattgaaatagtcaaaaattgccaggcacagtagtggcttacacctataatccaggcactttgggaggctgaggtgggaggatcacttgaggccggaagttcaagatcagcaacatagtgagaccctattgccacaaaaactaaaatattagccgggtggggtgctgtgtgcctgggtagtccatccaggaggctgaggcaggaggattgcttgagcctgggaggatgaggctgcagtgagctatgatctcatcactgcactctaacctgggtgacagagtaagaccctgtctaaacaaacaaacaaaaaaaaccaaaaaacaaataaatgtttaaaacattaaaaattaggtgtctgaatttagttagcagagtaggcacagccaaagccagaattagtggcctggcagtagaactgaagaaagacatcaaaatgcagcccaaagaagacaaagcgatggggattttaggaaagagacaaagactcatggaagacagagaacatctaacagaattgccatttagagttgtagggagagatcgtgacataggcagtgttcgaagagagataatggttgaaaatattccagaatggatgaaagaggctgatccccagattcaaataggccaggaaatcataagcaaaagtacagactgtagggggtgactgtggggcagcaagaccagccaggcatctgtcaccaggtccaggtcagagctcgcggtggcttggaccagggctgtggcggtcatgtggttatgagaagggcatgtttcgggagtagagtcgatggattatatgtgctgtgctaggatgaggtggggacattgaacaggtgagtgaatgatggcagacctttcagcaatgtgacaaaggccataggaaaatgggtcagagagggcagaacctgagtgtggtttggtcatgctgaatttgagatgtgtattagacatctgagtaggactctggggaggaagttggattgcagggagtcagggcgggagggagagagatctgagagagatcggcaccgtccaataaaaatataatgcaaaatacaggccaggcacagcagctcacacccgtaatcccagcaccttgggaggccaaggtgggcagatcacttgaggtcaggagttcaagaacagcttggccaacgtggtgaagccccgtctctactaaaaatacaaaaattagtcaggtgtggtggcgggcacctgtaatcccagctacttgggaggcttaggcaggagaattgcttgaacccaggaggtggaggttgcagtgagtggagattgtgccactgcactccagcctgggtgacagagcgagactccatctcaaaaaaaaaaaacattagtggggtgcagtggtgcacacctgtagtcccagctactcaggaggctgaggcaggagaatcgcataaacccggggggcagaggttgcagtgagccgagattgcaccactgcactccagcccgagtgacagagtgagactccatcttaacaaaaaacaaacaaacaaaaagcaaaatacaaatgtgtgcctgtaatcccagctactcgagtgactgagatgggaggattgcttgagctcaagaggcccaggctgcagtgagctgtgatcatgcctaggtgacagtgacaccctgtctaaaaaaaatataatgcaagccacataggtgtttttctgttttctagtatttaatatttcagtttaacctgatccacacaaaatattatcactttgacactgaatcagcgtaaaaattattcacgagctattttatttgacatctgtgtttggtgctaagtctttggaatgcggcgttgcgggtgtctctcagtttggactcgctgcagttccagtgctctgggggctgttgtatctgacagcatggggattgatggcagttaagctcgggcctggtgaagcccctgagggcaggtgttaactgggaattcccaaaagctgggcccttgagtggccctggtgcagcccagcgtgttacgctctggcagggggggtgggagtcatgatcaggggtgtgggaggaaaatcaggatcaggccatgactcagaatgctaagaactttgatggaggagggagtggccagtcgcaaatgctgccagcagtttctttaggacaaggacaggcagtcagcatcagcttgggggagacagaggttacaagccaccctgaagagggaagaaccgggcactttgaggactgagagggaggccaccgtggccaacatgtgtgggtgcagatgacattgtccctggagtggatgccgaggggtggtgctctgccagggtcaaggggccagggtggggctgtctggctctaggctgccccctccacactggaaacttggcctcagcagtgactggggcacgaaggaactttattttgtaggtagacttttatttaactttttattttttggagacagggtcttgccctgttgcccaggctggagtgcagtggcacagtcttggctcactgcaacctccgactcctgggctgaagcgatcttcccacctcagccccctgagtagctgtgattataggcgtgcaccaccatgcctggctaatttttgtatttctttttttttttgtagagatggggttttgctatgttgcccaggctccaggctggtcttgaactccagagctcaagcaatcctcctgcctcagcctcccaaagtgttgggattacaggtgtgagccaccactcccatctaggctttttttgtttgttttttttgttttttgtttttttttttttgaggcagtctctctctgtcacccaggctggagtgcagtggtgcaatcttggctcactgcaacctctgcctcccaagttcaagcaattctcttgtctcagcctcctgagtagctgggattacaggtgtgtgccaccacacctggctattttttttttttttttagtagagacgaggtttgccatgttggccagactggtctcaaactcttgacctctattgatccatctgcctcagcctcccaaagtgctaggattacaggcgtgagcctctgcgcccggtcattttaaccatttgaaggtgttcagttcagtggtttctagtatattgatgatgctgtgcaacaaccactaccacctaattgcagaacactcattgctccaaaaaaagactctgtacccattagcagtccctccccattccctcttccccccagcccctggctgccaccaatctgctttctgtcacagatttgcctaatgtggacatttcatagaaatggaaccgcacagtaggtggccttctgtgtctggcttcttccactcaacaagatgtttttcaggttcatccacattgtggtgcatatccgtgatttgctcgagatagagtctcactctgctgcccaggctggagtgcagtggcatgatcatagctaactgcagccctgacctcccaggctcaggtgatcctcccacgtcagccactccagcagccgggactacaggcacaagccaccaggcctggctaatatttgaattttttatagagacagggtctcactatattacccaggctagtcttgaactcctgagctcaagtgatcctccgtggcctcagcttcccaaagtgctgagattacaggcgtgagccaccgcgcctgacttgtggttttattttttatacttgaatatgcagcttgatattgtgtagtttaacattttcctaagtagcgccatagcccttattccacttaaccaagttgataaatagctcttattcctttgtgtggtatccttatctgtaaatggagatgatagaatccgcgtccttagagggctgtggtggggagcgagcgagctgtgcgggaacacttagagcagagtttggcccagagtcaggactcgggagatgcgctgtggctcaggagatgtgtgccgtggcagcgatgggaaagtggcccagagtcagggctcgggagatgcgctgtggctcaggagatgtgcgccgtggcagcgatgggaaagtggcccagagtcagggctcgggagatgcactgtggctcgggagatgagcgccatgacagagatgggaaggtggcccagagtcagggctcgggagatgcgcgccgtgacggagatgggaaagtggcctggagtcagggctcgggagatgtgcgctgtgacggaggtgggaaagtgccgtcacaaatggagcatcgtctgtggccaggcttcttgctggtttctggttctaacttgatgaccactgggcagtgaacgtttctgtagggtgagcgtctgggggcagcactgctggtcttggtctgctgcacacacagcagtggcctttctagacagaggaagcccagagcctctccagagggcctgtccctgtgtccgcctccagctgcagcacacgagggttcccagcactttaggaggccgtagcaacaggcgtcagtcgggcgagtatctgcctggatgacggcaggagccacctgctgggtggctgcacatccagtgagacatgctgccacaggcctttgactcgtgcaggtctcccctctgaggacttctcccctgtgtcttttgctgtctgttgggtgctttctgggaaaccctttactgataggccatggctgggccagtcttgacagctcccagcacctcctcttactcaaggctatggccatgcaccacacaatctcatttctgtttttttttgagacggagtctcactctgtctcccaggttgaagtgcaatggtgagatctcagctcactgcaacctctgcctcccaggttcaagcgattctcctgccccagcctcccgagtagctaggatttcaggcacgtgccaccatgcccagctaatttttgtatttttagtagagatggggtttcaccatgttggccaggctggtctcaaactcctgacctcaggtgatccacctgcctcagcatcccaaagtgctgggattataggtgtgagccactgcgcctggcctttttttttttttttttttgtagagacagggttttaccacgttggcctggccaggccggtctcaaacacctggcctcaagtgatccgcctgcctcagcctcccaaagtgttgggattacaggtgtaagccaccatgcctggcccaccatcttatttctttctccccaaagccgacaaggctcctcattttcctgaaggggaaacagcccatcagagagggtcagtggcttacccccatctgtgccccacagtcacaacctcatgcaggcgtgtctgaccccagaaggtgctcccctgggatcctcttctagaacaacatcatgctccatgctctttgctgtgctaggagctgggttatggttggggcctggagtcagccctctgagatgggctgcccgctggctgccaggttctgtgccaggcaagtgctgaccctggtttcctgtgactgctgtgatgaattaccaccagcacagcggtgtcaaacaccggttctggatgtcggaagtccaacatccatctcacggggctaaaatcaaggcgtgggcagggctcgtcccttccgggggccctagaggagaggccgcgtccttgccttctccagctcctagaggccacctgctttccttggctcgtggccccttcccccatccccaaaggcagcagtgtggcatcttctctcctgcctgacctctgttccatcctcacatcatctctgactctgaactgtatctttcccttataaggaccctgtgatgacattgggtccacctggatcacccaggatcctctctccatctcatgatccttaactttatcatatctgcaaagtacccccacccttttttttgtttggagacagggtcttgctctgccacccaggctgcagccttcacctcccaggctaaagcgatcctcccacctcagcctgccaagtaggtgggtctacaggcatgcgccaccacgcttggctaattctcatatttctagtagagatgggggtctcaccatgttgcccaggctggtctccaactcttgggctcaagtgattctcccacctcagcctcctaaagtgctgggattacaggcgtgagccaccctaacccccagaacctgtgaatatattcccttggattcaaaagagccttgcaaagtctgttccctcacaacaggcagagggaccctttaaaaacctaagccagatcaaaaatacacccattttctcagtttgttgtggagagaagataaacgtgtgaatccacccagagacctgtgggagtgctggacaggccgaaggggtccgggggcagctgttcctgctgtcgtgttaacatcacgctgattctctgctcaccacccacagcggctttcatctcccaatcggtaaaaagccaagtcctcacttcagccaacaaggccctgcagggtctggctctctgttccctccctgtcctatctgcagccctcctgccccatggctcaggccgcagcctgcaggcctccttgctgctcctcctacacacgggctccgccttcctgatggccttggcacaggctgttccctctgcctgggatgttctgttgcagaggattttcagtctttcctccttaagttactctgttttgtttatttttaaatttttttatttatttagagacagctctaactctgttgcccaagctagagggagtgcagtggcacagtcatggtgcactgccgcctcgacctcccagtctcgagcaatcctcccacctcaccctcccgagtagctgggattacaagcctgcgccaccacacccagctaatttttgtatttttgaagagactgggtctcactgtcgcccaggctggtcttgaattcatggcctcaagtgatcctcccacctcgacctcccaaagtgctgggattataggcgtgagccaccatgcccagccctgacagtatttgatgtatgtgttttcgtggtgctgtctgaaatgtaagccctgtgaggacaagtgtttggaccactttattcaccactctatccatggagtgaacagcagtgcctggtaccccatgggcacccagtaggtgcttggtgaatgaatgaaggtgcagagccaggcttgacatgttcctgagccctgtgaggttactgagatgcaatcattttgcagatgaagacactgagtcctggtgggccgtgaggtcagcgccagactggatcctgcggccgcctggctgtctgtccctctcgctggcctcgcacacccttcctgggaggaacaggagaggaggggaggtgtgcagggctggggtcactgactctgcttcccctgccctgcatggtgtccccacagggacagcatggacagtgtcaagcagagtgcggccctgtgcctccttcgactgtacaaggcctcgcctgacctggtgcccatgggcgagtggacggcgcgtgtggtacacctgctcaatgaccagcacatggtgagcccccagccctcacacccccggatacccagggctcccacctcagccctgacccccctggatgcccggggctcccacctcagccctcacacccccggatacccagggctcccacctcagcccacgcaccccctggatgcccggggctcccacctcagccctcacgcccccggatacccagggctcccacctcagccctcacgccccctggatgcccagggctcccacctcagccctcacgcccccggatacccagggctcccacctcagccctcacgcccccggatacccagggctcccacctcagccctcacgccccctggatgcctggggctcccacctcagccctgatccccctggattcctggagcttccccctcggcgctgacgttcaccagacaccagaaaccatgatccagtgtccccggtactcattacctgcccaagtgtccagaaaccctcccatccccatctctgacactcccctggctggccagggatcctgtccagtgacccccacacccctcaccaaccacccagtcccttagaaaatcccactctgtttctaatacctggagattcccccaacagcgcccatcacctgcgcaccagcgcagaaaccttgactgtcccacccccacagtcccaaccctctagagtctcgccccttcactgctccttacccagctgcctggggtcctgccagggacaccccacacacccaggtcagtgctggccatggcgcccgaggccccgtggcctcctcaccccacccctaaagcacgcacagtgacacatgtgcacacccctaaaccccatcttcccgactgcacacacatcccgaccctgtcccgctcctgagcctctgctctcaggtaccacctcccccaggggcctgacttgtctctcctctgcccctgcagggtgtggtcacggccgccgtcagcctcatcacctgtctctgcaagaagaacccagatgacttcaagacgtgcgtctctctggctgtgtcgcgcctgagccgggtgggtgtggcctagatattggctgctggaggtggccctggcatccctatgccctctgacacccctcaggcccccactctccctgagaggcagcccagcccaaggtttacaaactcaggctctgagctggattcatcctggctcggcctcttcctggctgggtggccctggacaagtggcttcacctccctggcctcagctgccccctgtgttcagtggggataataccggtgcccacctggaggcacagagcgctgtggatagagtgctcagaacagggcctcgcgggccgagcaccccgggagccagccgccctcatgacctcctccctctcccacttctctctctgtctcccactttccctcttctggctttgcctcccgcctctctctttcctgtgcagcctctcactcctgcctggcgtccctctcccacctttgctcctgtcctgcccaggaacatcccctgaggccttgtgcatgccaggctccatgtcgggtgacaccagggacacagatgagtcagaaccaagctctgctcttaaggagctccctgtccttctggcagggaggtgactcagtcacagattgtcagaaaaggggtgactcgtgctataatggaggtaggataggtcacccataggaggcacttaacacagcctgtgagtccacgaaggcttcctgggggcggcgatcccagaattgagacttagaatacacatgcgcatctcctgggcagtcaggaagaggcctggattcgcaggcaaagagaagaacacaccagctcgtgcatccactcattgtttctttttttttttttttttttttttttttgagacggagtctcgttctgtccccaggctggagtgcagtggcgcgatctcggctcactgcaagctcccaggttcacgccattctccagccttagcctcccgagtagctgggactacaggcgcctgccactatgcccggctaa[141 bp omitted]tttctttctcaggttttttttttttttgagacagggtcttgctgtcgcccaggctggagtgcagtagtgcagccatggttcactgcagcctctggctcctaggctcaagcgatctctcgcctcagcctcccgagtagctgggactgcaggtgcctggctaatttttgtattttttgtagagatcggtcttgctttgtcgcccacactggtctcaaactcctggcttcaagtgatcctcccgcctcagcctccgaaagtgctgggattacaggtgtgagccactgcactcagcctcagtcattgtttcattcattcatcacacatctgagtactgcagtgtgccaggatgacagtgaggtaggaacacagaccagcacggaggtgggacagagcttcctggagaagggcttttcaaggttgaataggagtttgcaatgaggaaaaaaagtcacatgatctttctttttttttgagatggagtttcgctcttattgcccaggctggagtgcaatggcgtgatcttggctcactgcaacctctgcctcccgggttcaagcaattctcctgcctcagcctcccaagtagcatggatcacaggcatgtgccaccacgcccagctaatttttgtatttttagtagagatggggtttcaccat[137 bp omitted]cgaacctcttcctatctgaccttgtattaggcctagggacccaaaaaagggtcagacccaatccctgcccctgagtggcttcaagccttgtagggggactacaggaaacagcctccaggagccggtgcgctgtgtgctctgacggaggaagcctggggcatgggaggctcagagccgagtgaggagggggccctgggaaactgtcacacagaagggaaccagcagagacctttcctgcccaccacacaccagcattacttggaaagatcaaccagccgggcttagtcctagttttgcccccattcagtgtgcctgacgcttcctcgctcccttcccagagcctcagattcctgcttcataaaaccattgcattggtcgggcatggtggctcatgcctgtaaccccaggacattgcgggactgaggtgggagaattgcttgaggccatgagttcgagaccagcctgggcaacatagtgagaccctgtctctacaaaaaaaacccactaacaaaaccattaacactgacagcactgcccttggaaggcaccatttgctccaccctggcatgtggacccacgtgcccctcccaccccagcccccaacttatttcttgctcttccccgccagatcgtctcctctgcctccaccgacctccaggactacacctactacttcgtcccagcaccctggctctcggtgaagctcctgcggctgctgcagtgctacccgcctccaggtaatgaacgccgtgcactccccaacccggggtggcctgctgctggcatctgggggcctcctgctccacggcgcaccaggtgggactggagggtctgggtcaggatttctctgaagctggggcggttcctctgtccccttacgtggctgcactcggggaggcaagcaggcagcccgaggcccagcgcctaccctgtgcagcatcgtggatcagcctcatagctgaggtccctgctacccgggctctcactccagccctgttgcgagggactgttaactgtgcctgttttatagatgaggaatctgaggcttggagagggagctcctggcccagcgtcactcacccggtcagtgggtgattccaggccgtgctacctgaattaccatagccctgtcaggggttttcacatctgttgggaaccttcccctactgctcacagtcacaatagccagtgtgtatgaaactcctgtagtgagccaggcactgggcagggggcacctgcacctgccgaacagagctggcaaggaggaacagccagtgtgatatgcacacagggaaactgaggcttggaggtgagacatcaccattctaggcagtaagtggcagttggcccccagactctctgctctaaacccctccctctgccactgagctcccccgagcttctgtcgccttggctgactgacctcatggagcagtttcttcggaccctgtgctgaggggcttggcacacagtaggtgctaatgcaccagttccctccattcagccagcatgtccagcacctgccaggggccagggctgatgtacaccaccaaatctctgggtgtgcatgcctgtctgtgtgcatgcctgcatgcgtgcatgcgttcgcctgtgtgtgtcgatacctgcccgtgtgcatgcatgtctgcgtgcatcccctgtgtgtggatgtgtcattgtgtgtgcatctgtatgtatgcgtgtctgtgtctatatgtggcagtgttcatggtatctctgtgtccctctatgtgtgtacatgtgtatatatcagtgtgtgcatctacatgtgtacctgtgcatgcaagtggatgtgtacatgagtgtagatacctgtgtgcatgcctgtgtgtgcgtgtctcaatgcttgccagcatctacgtgtgtccatgcatgtccctctgcacatggtgtgtgtgtacacactctgagtatacgatatggaggtgacaccagaggcccatcgtgtgtgaagccagtgatgaattctgttgtgtggccctggggacatgtcttccttctctgggcctctttttcgtcctgtcaagaagggcttaagtcatgctctaagcccatgaccaccccagaaggcccagctggtaattctggggtacacccattgcaggcacctcacccactccaaccctcggtggtgtaggaactggagacacagccttgtcctgaggctgggcctgaggacacaccaaccctgtgtcacctccttttcagcaaatggtggtgggctattgccaatttgtttgcaagtcatttttttgtcatatgcattatgaaaagtttcccagcatccagataagtacagagatttcattacttggacttcacattttgccatgtatgcatgctcttgtttattttcttctgaaatatttaaaagtaaattacagacatcatgatgttttgcctttaaatatgttgttctgggccaggcacagtggctcacgcctgtaatcccagcaatctgggaggccgaggtagaaggatcacttgagctcaggaattcgagaccagtctggccaacatggcaaaaccccatctctacaaaaaatacaaaaaattagccaggtgtggtggtgcatgcctgtagtcccagctactcaggaggctgagatgggaagatcgcttgaacccgggaggtggaggttgcagtgagccaagattgtgccactgcactccagcttgggtgacagagtgagactctgtctcaaaaaaaaataaaaaaataaaaaaacagaatatatatcacagtacaatctaggatcacatattcaatcggattctgccaggctcagtggctaacactgtcatcccagcactttgggaggctgaggcagaaggatcgcttgagcccaggagtttgagatcagactggacaacatagttgccctgtttccaaaaaataggatttaaattggattctgtctttgttatttctcgtagtctggactagcccccctacacctgtttatggagaaaccaggagatgccattgctgtgtgtcccatggtggcgactgggctcattgctgccttgtggtgtattttagcttgttcctctatctggtgaattttcctgcggaaaattctgcagaaaaatctgcggaaccattttttgctggaacgcttgacagctcttgcatacacttgaaaacacgtcacattctaggaaacgtggtgattggtgctcctgtgagctgctggctggcatctgtcagtggtggagagctctggggggtgagggggcacctggttgagccttgtctcctttggcctcccagcctctaggccaggaggatggcaccgagtgtgcctgcagtggcctcttgctgaatggacacttgggtgggtggcttgtgcatttttgtcaggggctgctcagcactcacaccagtccttgggaaggcctgggtttgggggcacctctggggaaggttcctggagcttcctttgctctgtgagaaacctaaggagcctcagagctgcagatgaggaaactgaggctcacatggtgccacctcttgcccgagagggtcagagcaggaggagagcccaggtctggggatagatcttgtgtctccagaggtgccttgtctcaccatctctgctgggctgggaagaggttgagggagcagagaccctggccctgagctgcagaattctcgagtgtcagaggcaccccgagctcctcctttggaagacaggagctggggcatggccaccaccccagcaggtgtgccaggtgggcaggacactcagccgggggcgtccccttcgtttccccagaggatgcggctgtgaaggggcggctggtggaatgtctggagactgtgctcaacaaggcccaggagccccccaaatccaagaaggtgcagcattccaacgccaagaacgccatcctcttcgagaccatcagcctcatcatccactatgacaggtgcccgcctgggcctatcagggcctgatgcctggggccaggaaagaggggcatggaggcccggactcctgagtcctaggcagagggcagggaatcttgacttttaggtagggtaggaggaggatggggctgtgaagtgtcacctgtgaggttggtgctggggcccttcctgggggcagaattgctaggtatctttctctgggctcaaaggcccagttgtctgggtcactggaggtgcagtactgcgatgcaaggccggcaaggttaagacctggatccttgggggctgtgagatgggtcagctggggcccgagtcctccaccttctcctgtcagtttctctcaccatccctctcttgtggcccctgctggcagtgagcccaacctcctggttcgggcctgcaaccagctgggccagttcctgcagcaccgggagaccaacctgcgctacctggccctggagagcatgtgcacgctggccagctccgagttctcccatgaagccgtcaagacgcacattgacaccgtcatcaatgccctcaaggtgtgagcccttggagcccaccccgggcctgccacccccctcagaaagaccagaggctcagaggcccttgggtggccaaccctgtgccaacagggagtctaaaacacacctgggctctgctctccgccctcagacggagcgggacgtcagcgtgcggcagcgggcggctgacctcctctacgccatgtgtgaccggagcaatgccaagcagatcgtgtcggagatgctgcggtacctggagacggcagactacgccatccgcgaggagatcgtgagtgctgtggggtgcgggctggactcttgggtctgaggcaggaggtggctgggggcctggattcctaagtctaagggaggaggggctggggcctggactcctgggtctccagatgggggcagtggtgagcccagatccaggtgagtgaaagcccgacatggcctgcggcacactctctctcacacgccccggcggcaggtcctgaaggtggccatcctggccgagaagtacgccgtggactacagctggtacgtggacaccatcctcaacctcatccgcattgcgggcgactacgtgagtgaggaggtgtggtaccgtgtgctacagatcgtcaccaaccgtgatgacgtccagggctatgccgccaagaccgtctttgaggtcagcatccctgaccctgaccctatgaccccacgacaggacctagaggcagagcaaggatggccggggccgtggcgcctgccagcccgcagccaccctccttctcctgcactgccgtgacctcaaaatggggcctctgcctctctgggccaacccaggggacccagggctatggtctcatgggcctgatgtgaggagtccccagggcatgggcatggggcacccagtgtgcagtcctggcccccggatctcggtagtttccctctgccccaggaaaggggccccacacagtcctgttttttgtttgtttgtttgtttgtttctggagacggagtctcactctgttgcccaggctggagtggggagtgagtgccgtggtgcgatctcggctcactgcaacctcggcctcccagcgtcaagccattctcctgcctcagcc[132 bp omitted]cggcctcccaaagtaccaggattacaggcatgagccactgcttccggcccacagccctgttttacttcctgtgtgagcttgggcccgtcactcaacctttctgtgactcagtttcccacctataaccccacctgcagcagagctttcagtgttccaccagtcagtaggtggctgcacccaccgatcccggagagggcgctcattgttgtcctctccacgcccttccccaccccactcaggcgctccaggcccctgcctgtcacgagaacatggtgaaggttggcggctacatccttggggagtttgggaacctgattgctggggacccccgctccaggtgagggagcctcagcctgcaggggagaacacacatgcttctgaggggtccagggcttgggggatccccaggggtctcagggcaggcagtgatgggctcccatcctctcggcctccaccccaatccacctagcagggtaagaaaggagcttagtcccaggatcgtggacagagtgtgactgcggcccctgtctggtgcctggggagggccactcccctccagcagcttggggtcctgggacgggtccatcctagggaggggcacctctcgagggggtttctgggagagggcagtggaacctggccccgctgacacccactcctgcacacagccccccagtgcagttctccctgctccactccaagttccatctgtgcagcgtggccacgcgggcgctgctgctgtccacctacatcaagttcatcaacctcttccccgagaccaaggccaccatccagggcgtcctgcgggccggctcccagctgcgcaatgctgacgtggagctgcagcagcgagccgtggagtacctcaccctcagctcagtggccagcaccgacgtcctggtcagagccctgtccccccaccccacccctcttgcacacccccttcccgccctcccctcctcctgacccgaactgaccttccccaccccgaccgcgccaggccacggtgctggaggagatgccgcccttccccgagcgcgagtcgtccatcctggccaagctgaaacgcaagaaggggccaggggccggcagcgccctggacgatggccggagggaccccagcagcaacgacatcaacgggggcatggagcccacccccagcactgtggtgagtcccctggggtgggccctgccagggtgcctggggctgggtcctgccgggcgccgcctgtcctcaccgtgacctgcgcttcctacagtcgacgccctcgccctccgccgacctcctggggctgcgggcagcccctcccccggcagcacccccggcttctgcaggagcagggaaccttctggtggacgtcttcgatggcccggccgcccagcccagcctggggcccacccccgaggaggccttcctcaggtagcaccccctgggcccgggccccttctcgcggccacccccagggctgtcccttctcggcctctgtccccgttttccctgagcccctcccccgcccccgactcgctcctctctccatcctgatgccttcgccagccctggctgctgcctcccctgccccagcctccctgctcacgccctccctctgccactctggactccgccgaccctggccacccttcgttgtctcctttcctgtcaccgtttctcagcctgctcttccttttctccttctctccttccctcttccgtccctccctctctgtctctcttctgccctctcgctgcctatgtggaattggctgcctgccacgcctgtcttctcttgtctgctctgggattggatggctcagcgagctggagccgcctgcccccgagagccccatggctttgctggctgacccagctccagctgctgagtaaggggtggcctggggtgggaggtcggtcgggggggcggactcgggtgtccccagggagagttaggggactgggagccctcgtcaacgggttcctgatgagcagcagaggcagggacttggaggaaagggaaacttggtgtctgccgatgcgggggcacgggccagggttctattcccattggaggccactgctggatggatgcgaggttcctcgaggctctgtgaggggtctggatatgtggttctggggttctgtccttagggcttgttctcgcactcaatcgctctgggcctttgcccctccccaccaagttccttcccatctcactctgctccatgcctccagcccaggtcctgaggacatcggccctcccattccggaagccgatgagttgctgaataagtgagtcctgggagtggtgggggaggggaacgggacaggtgcggagcccaggccaggtgcagacaggcacccccgtcatcttgcgccccctgccccctcaggtttgtgtgtaagaacaacggggtcctgttcgagaaccagctgctgcagatcggagtcaagtcagagttccgacagaacctgggtgtgtcccgggggactgtgggaatgggtcggagggagaccttggggaaggggtcagagggactcagatggagctctgcctcccccacctactgcaggccgcatgtatctcttctatggcaacaagacctcggtgcagttccagaatttctcacccactgtggttcacccgggagacctccagactcatatcctctcaggcccggcccagcctcctgcctctccacgtcggccttcctcaccgtggggaagccggctgacccaggtccacacttctcttcagcctctcttgggcacgcaattagttctctgagattgagtgtctgcatctgttaagatgggggtgggattccttcccccaggacaggggatgacagtgaagtggtgtgtgggaggctttacttccagaactccacctgctccaggcctcattttgtccctgtctggcaccttccgtgtcctgccatcgtcctccactgggctccatgtcatgatgccagcaccgcctgcactcaggagccaggcctgcgggtccagacgctgatcaggcctgatctgggctgagtcactttgcctctctgggctctcctgtccccgctgtgaagtgtatgtagaccctcctcttcctcatagggttattgtgaagatcagagtgtctggaaaaccctggaagggcggctggaggtatcagtcccccctgcccgttctctgggcctccattgccacattcatgaaattagaaaagctcgacctgaaaactccttctggccgggcatgggggctcacacctgtaatcccagcactggcaggctgaggccagtggatcatttgaggtcaggagttcaagaccagcctggccaacatggtgaaaccccatctccactaaaaatacaaaaatcagctgggtggtagtggcacgcgactgtaatcccagctactcaggaggctgagacaggagaatcgcttgagcctgggaggtggtggttgtggtgagccgagattgtaccactacactccagtctgggcgacagtctcaaaaaaaagaaaaagaaaagaaaaaattccttcttcggtcgggcacggtggctcacgcctgtaatcctagcactttgagtggccaaggtggttggatcacgaggtcaggagatcgagaccattctggctaacatggtgaaaccccttctctactaaaaatacaaaaaattagccgggcgtggtggtgggcgcctgtagtcccagctactcgggaggctgaggcaggagagtggcgtgaacccaggaggcgaagttgcagtaagccgagattgcgccgctgcactccagcctgggcgacagcgagactccgtctcaggaaaaaaaaaaaaaaaaattccttctttcataatttccagaggctcgtgcaggcagctcagtggaggcagtgacaaaagaacatgagacccaggccttcccagtgggctactgacacggatgcagatgatgataacactaattgctaccatctttgtgtacttaccatgtgccgggcacacagacaagtacttgtgatggattcttttcttttctttttttaaatagagttgaggcctcgctatgttgcccaggctggtctcaaactcctgggctcagtgatcctccccaccttggcctcccaaagtgctggattacaggcgtgagccgccacacccggctggattatttcatcaactcctgaggacattttacacatgtccttgtgttgagacagggcctcactcacccaagctggaatgcagtggcatgaacactgctcactgcagcctcgaacttctgggctcaaggcatcctcctgcctcagcctcccaagtagctgggactacaggtgcacatcaccatgcctggctaatttttttgtagagatggggtcttgccatgttgcccaggcttacacatgtccagaggctaagagaggttaagtggttgcccacagccactcaggtggttaagagctgggattcaaacccaagtcagcctccagagctaatactattatgtctcagtgcggtgtgacattgtggaaggccaaaggaggcacctagggggcgcctcagaggtttccatagtatgaactttgtagttgaaccttgtaggattgagtccaggattgcaccatggggtccctcaaagacctgcaggcgggagctgccgggagctctggggttcctgacccagacctcccgggggcccacctcctctgtctggcttccttgactcctggcgggcacagctggctgtgcagaccaagcgcgtggcggcgcaggtggacggcggcgcgcaggtgcagcaggtgctcaatatcgagtgcctgcgggacttcctgacgcccccgctgctgtccgtgcgcttccggtgagtcaggtacggcgcggccggtgggcggagcctccggggtgaggggcggggcctaatggagcctccctttcacctcatcaggtacggtggcgccccccaggccctcaccctgaagctcccagtgaccatcaacaagttcttccagcccaccgagatggcggcccaggatttcttccagcgctggaagcagctgagcctgtgaggggtggggagggggcggagccaaagccgcgcctctgggtgggcgggtcgggccgtccaggtccctgacttgaaccttcccggtccccagccctcaacaggaggcgcagaaaatcttcaaagccaaccaccccatggacgcagaagttactaaggccaaggtgagagaccgcgggcgtgtttgccggcctatggctgctttgcttctctgagcctctgttttcccatctgtaaagtggggccaattcccatccccaagggttttttgggatctgggatgccactgtgtggtaactaacagctctggcacactctgacggcgccccccctcctcccagcttctggggtttggctctgctctcctggacaatgtggaccccaaccctgagaacttcgtgggggcggggatcatccagactaaagccctgcaggtgggctgtctgcttcggctggagcccaatgcccaggcccaggtgagtgctgctgtgggaggcctgaggccggcaggaaggccgcctgtcatctctgcgtccacccttcctgcctcactgttctttaattcacgtccccactttgaccctcctcctctcacatttctttgtccacttttactcctctttatctatcagtttaatctcctgtctccaacctctggtgttcctctcctcttcctgtccctccctgatttctacctttccatatcctttccacctttctctcatcttttataattttcttcctctctggcgcctctgttgatttcagtcttacatttttctctcctgtgtcttgtatcacctttctggcccctttatccttccttccttctatctcccttgggtcccgacttccctgggctccccatctcctctgagttctgcccccaatgcccccacccagatgtaccggctgaccctgcgcaccagcaaggagcccgtctcccgtcacctgtgtgagctgctggcacagcagttctgagccctggactctgccccgggggatgtggccggcactgggcagccccttggactgaggcagttttggtggatgggggacctccactggtgacagagaagacaccagggtttgggggatgcctgggactttcctccggccttttgtatttttatttttgttcatctgctgctgtttacattctggggggttagggggagtccccctccctccctttcccccccaagcacagaggggagaggggccagggaagtggatgtctcctcccctcccaccccaccctgttgtagcccctcctaccccctccccatccaggggctgtgtattattgtgagcgaataaacagagagacgctaacagccccatgtctgtgtccatcacccactgctaggtagtcaaagaagtggggtgagggcatgcagagtgtgggtggccaggcttcgcagcccatgggtgggactctggggagacagcagcagcagcagccgccgaagccccagctgcaaggccaccagacgcactcctgtgcctggttcctcagtccccaacaccaggtagcaagctctgggcagctgggcctggtagacctcatcttctgtcttctctggtggccctggctctggagaaagaacagggggcactgacatgacaagtagcatgctaacctttgcaagccacaccacatcctgatcccaagttctgaacgcgtggggtctctgaacacaggttttgggagcctcctgccaggggagggcctcggggctctagctggctgtcagcaacttgaagaccacaatgatgtcactcagctcaccctcttcctctttctcagccttggcccccattttcctggagaaactgtgcagctgcaggtgatcctcttagcaatacacatggcgaacacggcagcaacacaggagctcctgtagccttttccaggagcccacccgccccactgtacaaggcgggtggagggaaacaggcaggggccagtgggaggtggagtcgcacagctaagaaggggtgcagcccccgagttggagctcttgaccactgtgctgcattcatccgggcttcactggggtcacagcgccatcccaggtccctttctttgtctttctgggcccttaagggttctacgacaatttttccgttctaacccagaatcttgtgaaatcctcctccataccctcagcctatcagcaaagcctgtgcttttggcagttgtgcagagcgctggactgtgtggatatgggagcaagatcccctgtgttcaaatatggctctgccactcatgagctgagcctcagtttcctcatctgtaatatgggaatgatgaggtaatgggatagtcctcacctgtgaggatgaagtgatttcattctttcattacgtgtaaaggcactgggaagaggtgaggtctcagtgttaactattgttgactatgatccaggagattctgaagccaggcggggacctcccttcccctcccttcccatctgcatcaatgctcagatctcaaggaaaaccactgccctatggcccagtgcatactgggttcctccggatcctccaaccccacctcctactcccattttgtgcgacctgggactcagtgtccccgcctgcgcagtgggagcactgtgccttccgctgacctggtgggaagtgcgtggaggtgaccagggtatagaagtttcggaggaggcgccggcgctgttctggtgaaggctctgctgggaggaaaaggcggtgatgcagagcgcctccccggcccacgcccctcctacccctgcccctgcccctgtcctcagtcacctttatcccccaagggctccacggtgaagaggcagcgcttcagttccaggtggaggagcagcagcctgtgggaaagggaagggaatgtcatggctggggaagaggacatgacccccgacccactccctccatccgagccctacccgaggatgtctgtgtgaagggggaagccactgggcagcgcccggggtcccaacggcagacaggcccgcaacgggtccagcagtggctgccaccagcgctccagaagctgcagggggcgtggtcattgtgaggtcgtcatgggaaggcggggccggcgggggaggtcggggggtgtacaaggataggggcgtggtcaatcgggaggggcggggcctgcaagaagagtggagggcggagggcagaagggactggggaaggggcgaggcctggaagaatagaggcagaggcgggagcggccgatcttggcgggtaggtgaatgactggagcgcagtccagaagaggcggggctggggaaagatgccgctggcagggcagggtggtggggaagggccctcctggtagcgggtgtcctaagagcgaaagcgggacgtggcgcgggttcacctgtggatacaactggctgaggggtgggctcggcccgcagagtagacacagctccaggctcggcagcagagtcagggtcaggagccggtgtgggacctgaagcagggcacaggctggggctcatcgcggcccggcccctttccatcgcagatcccgcctcctcgcgactcggcccccaggtcacatccctccgtcggtgcccgccacccactcaccgtggggctcccgtgcggcaggtacaccgggtagtcgcgagcggtctgcggcggcagggaccccaccagccaggggagcagcacggcctcgggcgtccccagccgccaccaaccctctgttgctgccaccacccggccggacaccaccagactgacgaaggtcgtgcccgcggcctcagcgaacccggagagggcttcctgggtacgggaggcaggaggactgggagtcagcagacaagcgtagggggtggcagcgacttcccagatgggcagggaatggggagaaacccacagccagccccgagctcgcgcagtggccatgctcctacgtctcaccctctctgagcctgagttccttcactttcatacgaagtcacatccccaactcacactgtgaagtctgtgaaatctgattaaacatctagcctgggcgggcaaactgaagctaataatgtaaccgcagcagctaccgttcatccaggcctgttacatgccgagtaggcaccattagcaacgtagagaagccaagtcacctgctgagagtcacatgcctgggaggccgccacaccaggcaagtccacaagagcagtatttaagtagaggtagctagagatctgagaggcaggaggaagaacatgcactgaggttggaaacttgttgggatctcaggactgtgaggtagctgggtggaagtagactgtggatttagcaacaggttagggggtgccaggtgccacaggccttcaaacaccaggctgaggagctgggaccttgtcctgggggaggtggaggctgccggagggctgtgagcaggaaaggggcagagccagctctggatatagtagggttcttctggtggccgggtgtgatggctcacacctgtcatcccagcactatgggaggctgaggcgggaggactgcttgagcccaggagttcgagaccagcccgggcaacttaatggaaacccatccccaaccctagtccatctcttaaaaaaaaaaatagctgaatgtcagccgggcgcggtggctcatgcctgtaatcccagcactttgggaggctgaggcgggtggatcacgaggtcaggcgttcaagaccagcctggccaacatagtgaaaccctgtctctactaaaaatacaaaaaattagctgggccaggcgtggtgaccagcgcttataatcctagctactcgggaggttgaggcaggggaatcgtttgaacccaggaggcagaggt[134 bp omitted]gagatgagaggatcacttgaatccaggagttcaaggctgcagtgagctatgactgagccactgtgctctagcctggatgacagagcaagaccctgtctcagaaaagaaagaaagatggcccaggcgcagtggctcacgcctgtcatcccagcactgtgggaggccaaggcaggtggatcacctgaggtaagaagttcgagaccagcttggccaacatggtgaaaccctgtctctactaaaaatacaaaaaattagccgggcgtagtggtgggcgcctgtaatcccagctgctcgggaagctgaggcaggagaattacttgaacccgggaggcgcaggctgcagtgagccgagatggtgccattgtactccagcctgggcaacaagagtgaaactacgtctcaaataaaaagagagaaagaaaagaaaaaagaaaagaaagagaaagaaaagaaaaaaaaaaaagaaaaaagattcttctgggaccaggtggggataggactggaagctgagaggataggaggaggttgggacaatggtccagaagaaagaggatgaggactgagccagggccagcagaacaggtgtaagagtttccatagcatccccagtacctgcaagagggacccctctggaggaatcacgcagtccacacactgggtcaggtccccgatgagctccgagtcccccaggaagctgtcgatgaggcaataactggcctaggagaggaagaagggaccagcctaggattcaagtgggcccagggtcagacaaccaagaacctgtgggaccaggctgccccaggggctgctgggaactgtagttcccaaatggcagtgcccaggtatcctaacttcccaccctcatgtcctgcaacctcaccctcaagtccttcttcagtctctccacgttgcggatattggtcagttcttcaagtcccacaagaaggacctagaagaatcatataggagaggatgggcgaggggctgggacttgaactcctgggtctgaaggaagagggggctgggactcccacttctgggtctggggactggggagtcaagattcctgggttctggccgggcgcggaggctcatgcctgtaattccagcactttgggaggccaaggtgggtggatcacttgaggtcaggagtttgagaccagcctggccaatatggtgaaaccccgtctctacaaaaaatacaaaaattagctgggcatggtggcacgtgcctgtaatcccagctacttgggaagctgaggcacgagaatcgcttgaacctgggaggcagaggttgcagtgagccgagatcaagccactgcactccagcctgggcaacagagcgagactccgtctcaaaacaaaacaaacaaacaaacaaaagattcctgggttctgaggaaggaagtgttggtggtctgcactcctaggtctgagggaaaaggatgctgagatctcagattcctggtctggggagaaaagaggactggtgagtctcaccatggctccaaacaccatttggagtagtctctccagcctcagctcagagatgcccacctcagatgacagaacaatgagggtgatgctgtggaatggaagtgagaagaatgagtcaaggcctggggaatcaggaaggggtatgttggagtccgcccattgatcctagaacaccagatacatcctctctcagaccaacctgcctttcttatagagaacatcagggatcaaagagggtaactggcttgctaaagatcccatagccaaattaacagctgcttttagagagctggaaggcctccggggtcatcttcaacagggactatcacccaggccctgtccctgtcccacgttccctcctggggacctgtcatggaagcttttccacaccacagtcgtgttctcggtcctcgcagagctcagctgcacctccagattctgcccaaacatgtggactccattgagggaaccgatgacagagaacgggagctaaggaggggttagggacatcagacaagagcacccccccatccccttcccccttaggacccaagtgtgccagctcccagccccatcctctttccatatgacctggcagtgcctctttggggaaccaggcttattggtccattgcctcctcggtcctacaaattcaacactgaaacttccccagcccctactgccttgaagacccagagtcaaaacaccgaacccccttcggtttagatacaggcgtccaaggccccacctgctgacgggcgggggcgccgccgcgactgctcctgcagaatagggggaccccgctggaggccgcgaggcacagcagatgcacagtgccgcccgtcccctcctcccccatttaggactcccaccgcggtccctcacgtggggactgtcagtgcgggtcttggagcatggcggtaatcagagtaactcggcctgtggtccggagccgccagagggcgagatggggagctgattggaagaggattaacttcccgccttcttcacccaactcaaacagaccctcaaaccctattcaggcacctcccccaaacccattaggttctcttccgccctagccggaagtcacggtacccctaacaaagatggcggcaaattgaatttgcaaagctttctagtttctccgaggaggtaaagagaaccaagaagccggattgaagatgatgactgcgccaaggcgttgcctagccaccatcctgtaggctttgatgatttacattctaaacggaaaaaacagctgtgcccggatcaaagattgcgatggtcccaaagcattgcctagcaaccacattccctgtaggtttccagtatatagtagtaaacaatgtgccctactcaaagatggcgaccgtggcggggcgttgccaagcaaccaccattcagcctgatatccattccaaggctgtaaacagctgtgccctgctcaaagatggcggcacgtcgaagtccgagcaccctccttggggcgaaatcgagaaaaacaccatctcccctacaaccttcgagggtggttgagtccagcgatcgttgcctagtaaccactaaaaaaaaggttgtttttgttattagaaaaaagaaaacaaggaaatcctttattttccagaataataaaaataatatcatttctgtaatgaatttatacatgatagcataccatgtaaaatgtgaaaaatcccttccccaatttttttcctaaaatacagtttaacgtagactattcatacgttttcacaaagatgatcaatatactaacatttccacactttcttttttgccatgaaaaagtatgtctatttcatcttaataatgtatttttataatctattttatggatgtgacaaattgatttgaccaattctgtattgatgtacattaggttgttgaactcctccagactagccaactagtgctgggacagcattttactgactttttaaaatgcccttatgaatatttttattattttacacaggcagcatttacttgtaatgacaaaagtatttatgattcatttttcccttcctcttccttcttgcagatcagcccatctttctagcataatttttaattttcctacttcctaaagtacatctttttctcttttttttttttttgggagaggggacagggtctcgttctgtcgcccaaggtggagtgcagtggaaccatctcggctaactgcaacctccgcctccaggattcaagcgattctcctgcctcagcctcctgagtagctgggattacaggtgtgcccccaccacgtccagctaatttttgtagtttttgtggagacagggtgtcgccatgttgcccaagctggtctcaaactctttggctcaaatgatccacccacctcagcctctcaaagtgctgggactacaggcaggagccaccatgcctggcctaggtaccattttaatcttccttcttgcctattgatattttttttcctttctctggattacttttatcttccttacaactttattaaaatgttagttacacaggcataaaagagggggctgctctagatgaaaagaaacttgagacataatgtctaaatatgtgtgtggtctttgtttggatcctgatacaaataaaccaactgtaaaaacacattttgagacaattggaacgtttgattacacacttactgttggatgatactaagaagttaattttgttacaggtaacaatggcatactagtaatgtaagaaagtgttcataaaattggaaagatgcctgccaagcacacaggagtaaaatcatatgattgtatggatttgaaggcttcagcaggccaggcgcggcggcttacgcctgtaatcccagcactttgggaggccaaggtgggcgggtcacctgaggtctggagttcgagaccagcctgaccaacatggagaaaccccggctctactaaaaatacaaaattagctgggcgtggtggcgcatgcctgtaaactcagctactcgggaggctgaggcaggataatcgcttgaacccaggaggtggaggctgccgtgagccgagactgtgccattgcactgcagcctgggcaacaagaacaaaactccatctcaaaaaaaaaaaaaaaaaaaaagcttcagcaaatgagactgtctcaaaaaaaaaagggcttccgcaggctcactgcctataatccgggcactctaggaggccaaaacgggtggatcacctgaggtcaggagtttgagaccagcctggccaacatggtaaaaccctgtctctaacaaaaatacaaaaatttgcctgcgaggtggcacacacctgtagtcccagctactggggaggcagaggcaggagaatcggtggaaccagggaggcagaggctgcagcgagccgacactgcgccactgcactccagtctgggcgacagagcgagattttgtcaaaaaaaaaataataaaataaaaaaaaataaaaataaaaataaaagataaaagaaaaatagaaacccaataaaaaataattttaaatgataaaggtaaaaacctttatcattaggctttctgtaagtacttttcaattggtgattattattattattattacttttttttttttgagacagcgcctcgctccgtcccccaggctggagtgcagtggcgcgatctctgttcactgcaagctccgccttccgggttcacgccattctcctgcctcagcctccggagtagctgggactacaggcgcccgccaccacgccccgctaatttttt[261 bp omitted]tgcctcagcctctcgagttgctgggattacaggtgggcaccacgacgcccagtgatactgacctcgtgatgcgcccgcctctacctcccaaagtgctggaattacaggcatgagccatctcgcccggccgaagattatgttttaaaatatttactggccattcaaaattttgtgtgtgtgtttgtgtgaaactagtcaggtttctttttatttatttatttttattttttttgagacggagtctaactctgccgcccaggctggaatgcagtggcacaatctcagttgactgcaacctccgcctcccgggttcaggagaatctcctgactcagcctcccaagtagctgggattacagacgcccaccaggacggctaatttttttatttttagtagttagaaggagtttcaccatgttggccaggctggtcttgaaccccttacctcgggtgatctgcccgccttggcctcccaaagtgctgggattacaagcgtgagccacggcgtccggccctggtcaggtttctttctattaaaacaaatataaagtggcagggcacgatggctaacacctgggatcgctttagccgaggagtttgagacacgccagagcaacacagtgagaccccatctctacaaaaaatttaaaaattagctggaagtggtagtgcgcggctgtggtcccagctgctccacaggctgaagagtggctccagtgcgagtagaggctgccgtgagccaagattgggccactgcacttcaacctgcacaacagaaagagaccctgcctcaaaaaataaaaattaaaattaaaagataatagtaatgaagtgtttctatttttctatattgttattcatcagtaagatttatttgcgtagtacatttctgtcaacaaacacgctagaaagattttcccagttggccgtatatttttcaacttggtttatacagtcttttgggaaaaattaatgaagactacgttttctaactttgctgtagtgctaagaaactccatggcagtcattaagattttttcccttcagatagttttcgggtttcatttgttgcacttacatttttaatccacctggaatgtatttacgttctaagccagtttctggctcctctcccagaaaacaacgctcaggtgttgcttagcaacccgcacttggtttggtgttcggcttcttttcgggggggaaaacaactgccctcccttccaagttgaggacgaccttaaagcgtcgcctagtaacctcgtttccgccgatgtgattggatccttctcgcgtccctcccctagtccccacgcccgaaagaacagaaccagaaacttaatctaacggttacaaaacaagggcagcgggcccggcgcggtggctcacgcctgtaatctcagcactttgggaagccaaggcgggcgaatcacttgaggtcaggagttcgagaacagcctggcccacagggtgaaactctttctctactaaaaatacaaaaattagcggggcgtggttgcgggcacctgtaatcccagctactcgggaggc[134 bp omitted]aacgaaaacaagggcagcgtacgcgttgcatagcaaccaggtctcctgcccctccctttgagacaagaggcggacctggacgccccgctcaaagatggcggctgactgagccgctttcaatttatttagcttttgacaataattccgtctaacccatcaggcccctagaagggctaactatgccctttctgagtcttccacgcggtgggggcgaaggaggatggagctagaacgaagcctcagcgcgtgccccgcacaaacatggcagcattcccagcagccctaaaccgcccgacgcgagcgcgcgcgcggcgcaggcgcatttctgctcattccgcggcgtcggctgcggctgcagtggtggtggcgggtaccgcacggggtatggtccccgggtccgagggcccggcccgcgccgggagcgtggtggccgacgtggtgtttgtgattgagggtacggccaacctgggaccctacttcgaggggctccgcaagcactacctgctcccggccatcgagtgagtgctgtttccgcgactctaaccccgccctcccacttcagtttcgcacagtttcttgcctgactccgacctttcacttcctaccctcacaggtattttaatggtggtcctcctgctgagacggacttcgggggagacgtgagtctagggactcctgggcctgagggaggaggggccgggggcctggactcctgggtctgagggagggagaaagggctgggcctggactcctgagtttgagggaggaggggctgggggtctggactccttgttctgagggaggagggcctgggggcctggactcctgggtctgagggtggaggcgctggggcccggattcctgggtccgagggaggagggagctaggggcccagatccctgggtctgagggaggaagggctgggcgtctggactgctgggtctgagaaaggaggagctgaggcctggattcctgggtctgagggaggaggtgctggggcctgggctcctgggtctgagggaggaggggccgggggcctggattcctgggtctgagggagaaggggctggggccgagattgctgggtctgaggaaggaggaagctgaggagttcctggttctggaggaacgggaagctgggagccctgattccttctctaagggaaaagggaattgaggtcccagattaaaagttttctgtcctcccctcccagtatggggggacccagtacagcctcgtggtgttcaacacagtggactgcgctcccgagtcctacgtacaatgtcacgctcccaccagcagcgcctatgagtttgtcacctggctcgatggcattaagtgagctttcccccacttggggtgggttgctggtccctgtgaggggccgtgaatgagtgatggcttggggtggttggtgtccccgtgagaggctgtgaataagtgatggcttggggtggttggtgtccccgtgaggggctgtgaataagtaatggcttggggtggttggggtccctgcgaggggccgtgaatgagcgatggcttgggtttgagctgcaggaaacatctcatacattaagggattgaaaggactttgagggtgattgtgtttttgtcagaagtcacttttgtggtggcttctgtgtgctcagcaatgttgccatcagtttagaagtaggaaaaaccttcccattcagggaggcctggctgagctccagcagccaccttgtactccctgtgtgattgtcccctttctgtcctctctttttccgtctacccctgtcctccttttccagatgggtacattgtagcctcagtgcagggggatgggtcagagccaggatagatccctctgtggcttgggtcagaatttttttttttttttttgaaacagtgtcttgctctgtctcccaggcttgtagtgcagtggcacagtcgtggctcactgcaacctgtacctcctgggttgaagcgattcttctgcctcagcctcccaagtagctgggattacaggcacacgccactatgcccagctaatttttttttttttttttgtatttttagtagagacagtttcactgtgttggccaggctggtctcaaactcctgacctcatgtgatctgcctgcctcagcctcccaaagtgctgggattataggggtgagccactgttgcgggattcaggacgacaggagagagccctcgggttaaagcaggagaatctttcattgagtgcactcaggcccaagccgactcacgtccaaagacggcccagaacaaaggtagcacttgacttttatacacacttcacaaaagggggtgggctagcttgaagcaagcttacagtggcgtgacagcagggatacagaggcagaacaaaaacagttaatcaaattgttgtaacaggtttataactcaggattgcacataaccgttgctatgcaacccagatgtcccttatctaggttagcctaggcacgggcttatcccataaccttcactgtggtgcccaggcagctcaggcttctcatgaccttcgctgtacttcttagataaaacagaatacttgaagtcatgagttacagagaacaggaatctataaactcattccataaaacaaaggaaaatttgttttttcttctctctatgttgagggagtgctgggagagtctccaagagcactttagatagtattatcaagacttttcctgggtctgggctgtgcccattgctgcctctcagacaagtcagcctaatacatagaacttatttctctttttaattttttttctttaatttcctgcctcaccaccacgcctggcgctggatcggattttgatagttgacattgtagagtctggagtcaggcagacgggttaaatcctggctcttccagcacagaactaactctcagacccaggagtctgtcccctctgtgcctagtatctcacttgtgaagtggggatgtggatagtacttgtattagtatttcattgtattacttattcttagctgtataatagattaccaccaaataatggctgcatactgcaaacatttattatctaacgcagtttctgtgagtcaaggacacaagagtggcttggctggatggttgggctgagggtctcacaaggcaatagtcaggaggtcggcaggattgcagccatccaggggtttgactggtggtggggaatccgttcccaaggtggcgagtctgtggctgttggccacaagacctctccacagggctggttgactgtctaacatggcaactggcattcctcagattgagggacccaatagagagagcaaagaggaagccccaggcctctcttgtttttgaggaagggtctcactctgtcacgcaggctggagtgcagtggctcagtcacggctcactgcagcctcgacctcctgggctcaagctcaagcgatcctcccatctcagcttcccgagtagctggagtagcagggacggtagccaaa[137 bp omitted]catggtgaaaccctgcctctactaaaaatacaagcaatcatcctgccttgacctccctaagtgctggagtgctgaaattacaggccttagctgggcatggtggcgcatgcctgtaatcccagctcttgggaggctgaggcaggagaattgcttgaacctgggaggtggaggttgcagtgagccgagatcacaccattgcactccagcctgggcaacaagagtgaaattctgtctcaaaaaaaaaaaaaaaaaaaaattttgtagtggcggggcacggtggctcatccctgtaatcccagcactttgggaggccaaggcgggcgaatcacctgaggtcaggagttcgagaccagcctggcc[221 bp omitted]tgaggcaggagaatggcgtgaacccaggaggcggagtt[134 bp omitted]actcaggaggctgaggcaggagaatcacttcaagccaggaggtggagagatcgcaccactgcgctccagcttgggtgactgactgactgagaccctgtctcaaaaaaaaattgttttttttgtggagacaaggtcctgcaatgttgcccaggctggttttgaactcctggtctcaagtgatcctccacttcagtgtccctaagtgctgggattagaggcatgagatgctgcacccagaggccccactaggctcttt[145 bp omitted]ctcccgagttcacgccattctcctgcctcagcctcctgagtagctgggactacaggtgcccgccaccacacccagctaattttttgtatttttagta[156 bp omitted]cccagattggagtgcagtggtgggatcatagcttgctgcagcctcgacctctcgggctcaagtgatcctcccacctcagcctcctgagtacctaggactgcaggtgggcaccaccatgcatggctgatttctttattttaattcttgtagagatgaggtcttgctgtgttgctcagactggtcttgaactcctggcctcaagcgatcctcctgccttgacctccctaagtgctggagtgctgagatcacaggcctgagctgcggtgccaagtccacttctgccatactgcatttggtgtgcagtataagcctatcccgttcagtgtaggaggagactacccagtgtgtaaatagcaagaggctggattgctgggtgctgtattgggggctgggtaccgcaacctcacagcgatgtttggagaattaagttagttgatgatgtttaatacagtgcctggcatgtattaagtgccgtgtaagtgtttcctaggattttgtgcctcactctcctggtttgcaaatggataatggtcgcgtgtatctccgtgttgttagaagatcacaggagctaagttgcttgctgtgtgtcgcttagggcctggtctgcagtcaaggttcattaaacaacacctgttcgtagcggccgttacctctgtatgcttctgcagcaggtgtttgttgagtatctgctttgttccagtatgtgcgtgcaagtgctgggtgcaggacatatagtgaaaaggtgacacagaagcttccccttcgcggtagctggaattcgtaggtaacacagagcagggtttctcatccttggccctagtgacactgtggacacagtcattccttgtagtgggggccgtcctgggtattgtaggatgtttaacatcatccttggcctctactcactagatgccggtagccccctcccaaaggtgtgacaaccaaaaatgtctccaggcattataaaatatcctctgggaagggggcgcaaaatgtattccatttgagaccactgggagagaccggtaagacagtcttgagtgatgttaaatggagacttcttgaggcccaggtccaagtctgatgctcctcaagtgcctggcagccagcacagggcctggtacacaggaggcctcgggtaaattctgtagaatgaatgtccagaatgcatttaatactaaccaccctggaagacactgcatagccttccagacccagctcaggtgtcttataccctgggaaaccttcccgattcttgcagccagatgcttcctcctctgcctccatgacctgtcacagccccacacctctggactgtgaatgtccaggtccctgggtgcttctgccatttgcttccagctggggcttggcacccacggggcttcaggagactggctgaataaatgaattagtatgtaatacaaaaacaacaaataaatagaaaaaattaaccaggcatggtggtgcacacctgtagtcccagctactcaggaggctgaggtaggaggatcaactgagactgggaggcagaggttgcagtgagccgagattgtgccaccgcactccagcctgggtgaaagagcgagaccctgtctcgggaaaaaaaaaaaaaaaaaagaggtggaaggaaaatagacccagtgtgtttcccataacattatgacaactcagttgttcattcatatgttcactcattaattcaacaaatgtttgtggaacaaatcgtcctgggcaccaaggagttagtgggcatgagataggcaaggtcctggccctcatggaactagtttgcctgggtgacaggccgtgtgtagggagcccttggtcatggccggatgctgttaacattcactcattttgacctcctggggctccaggcacctgttagccgatgaaagcgggcagcagagaccccggggaatgatactgggtagaacaaatgggagtaagttagaggacttgggaacaccaagtcagagcccacttgtgtcacctagggggcttttatttttattttgtgtctgccatatcaaggggtttatttggaatttatcataaacttgatattttagccatattttgcagccagccatagtgcttcttctgttcaagttttccacatttctttgacaaaatgtttattacatgtcgccctttgagcttgtagcacatgacttgtacttagtgttcaataagagaaacgcaagttttagcatctcaaactggttagtttatcacacttttcctcataagggttttgttttgttttgttttgtttgagatggagtctctctctctctcccaggctggagtgcagtggcatgatctcagctcactacaacctctgcccccgaggttcaagtgattctcctgcctcagcctcccgagtagctgggattacacgtacccaccaccatgtctggctggtttttgtatttttagtagagatagggtt[132 bp omitted]taattccagcactttgggagggtgaggaggcggatcacctgaggtcgggagttcgagaccagcccgaccaacatggagaaaccctgtctctactaaaaatacaaaattagctgggcgtggtgccgcatgcctgtaatcccagctactcgggaggctgaggcaggagaatcacttgaacccagaagtcgaaggtagtggtgagctgagatcgtgccattgcactccagcctgggcaacaagagcgaaactccatctcaaaaaaaaaaatttatcaccccaaagaggacaccccatatgcatgaagcactagctccccattcccccatccccccatccccagccagggtggttttggctcgagtcccagaaaggcccaggaaaatattggcttaatttcacctgtagcagaacagctgggtccagagttggttcaccccaactctt[152 bp omitted]ctacttaaaaattaaaaaaattagccgggcgtggtggcgggcacctgtggtcccagctacgagggaggctgaggcaggagaatggcgtgaatccgggaggcggagcttgcagtgagcggagatgtgcctctgccctccagcctgggagacagagcgagactccgtctcaaaaacaaaagctgttttgatggctaggaagaggagggctgggaagtgtgtggtgggttgggagcagcgcccgagtgccctgagagcaggaagaaggctcaggggctcagtgtgctcactggccgggccgagtgggactggaaggaaatcagtgcgagaactcaggcaggaagcggagagccccgctgcatggccctgccaggccaccagtgcactgagtactcagcagatggttcctaggccttgtgtgacctagggtcagacgccttggtgtctctcttggagggctgcacagggtgcggagagaagcttgacagctgcagtatcgggtgatctatgatgtgactaagggcaggccgtaaaattaggtggcatgtagggaaggcttcctataggagggcacaccaggatgggtgtcgtagtttagctggattccatccgggccggaatgggtgtgttccagcacatgcagagacctggatgtctgggctttgtcagttgagaggacctataggtgcgggcatggagcaggagagatggacggggtgcaggactcggaggcctcggatgctgggccgatgccgggccgagggcctgggttggttccagtcttgatggacacggttgggcctgtagacgttcattcacttagcctacatttcctgaggcctcacatgtgccccgctgtggtgggcaagcctgggggtaagagaggactcagaccccatccccgcctgtgggagaggtaggatcagagaccacacttcagggggacagggccctcaagaccctcagaggggtgctcggtctccacacacgtcccctgcagcaaaggtcagcctctcacgaccacgtgaccggaataatggtggcaaccacagctgcccttgaggagaggccatccccgggccacaacccatgtgggacggatgctgcgacgcgactgcagatcaggcggaggagaaacgagagtctgtgtgtgttagtttcccaggctgccgtagcaaagtatgagaaactggccagaagaatggaaattgatgtctcagggttctggaggctggaagtccaaaatccaggtggtagggccaggctgtctctgaaatcttacaggggaagggcccttctgcctttcctggtgcctgctgaggctgcatcacccgtcctcacatggcctctccctgtgtctctctgtgtccttgtgtcttccctctgtgtgtgtgtccgtgtccacgtttctccttttcacagacaccagccatagtggattagggcccgcaatttaactcgattacctgtgtaaagatctttccaaattaggtcaccttctgaggtactggggcttaggacctcaacctgtctttttgaagggggcacacttgaacccataagactaggaggacagaggaggcccccgtctctggctgggaaggtgaagtggggccaggactgatttggagcagacagcccagagaggggaggggacagcaggaggctgggcatggagtcagtcactccagggttggagtcagcacaggatcctaggcttggggtccccagccctttcccattccctcccagtcctcatgattaaagacaacaaatgtcggccgggtgtggtggctcactcctgcaatcccagcactttgggaggctgaggcaagtggatcatgaggtcaggagatggagaccatcctggctaacatggtgaaatcccgtctctactaaaaatacaaaaaattagccaggtgtggtggcaggcacctgtagtcccagctactcgggagactgaggcaggagaatggcatgaacccaggaagcggagcttgcagtgaactgagatcatgccactgcattccagcctgggcgacagagcgagactccatctcaaaaaaaaaaaaaaacacagacagcaaatgtcccctgtcctgtctgggactggtgctgtgctagcaccagggattgggtagggaactcagcagggtccccgtcatcccaaggtgcatagcccaggatagagtgggggacagcatgggagcaggctcttcaagcatagcctggggatggggatgatggcaaccctgggggctgaccgctctgcccctgcaggttcatgggcgggggtggtgagagctgcagcctcatcgcggaaggactcagcacagccttgcagctgtttgatgacttcaagaagatgcgcgagcagatgtgagtgccccctccacccaggccgggccggtctctctctgcctggcctggaaccactttgcctgtcgagtggttctacctccagcctcaccctgtagggcatgggctctgtgtccccaagcacgctgagccaggaggctgcaggtgtgtccttgggggacgcctggccagtgcccggtctcagcatccccatcaggaagcagtgccaactctgggtgtcactcctgcctgccctgcctgctgggtgacgtagagcacatcccagaacctcttggagcctcagtgttctcagctgtaaagtaggggcgttgcttctgattccatgtgaggcggaatatgtgcatctccgctggtgctgggtctgggttccttctcagggcctctgttgctgctggctccatgtcttctctctttcctggtagtggccagacgcaccgggtctgcctcctcatctgcaactcacccccatacttgttgcctgctgttgagagcaccacgtactctggatgcacaactgagaatcttgtgcagcagattggggaggtgaggactccagggtctgagggacgagggtctgggggcccggagtcttgggtctgaggcaggaggcactgagggcctggactcctgggtctgagggaggaggcactgggggcctggactcttgggtctaagcggggaggcactgggggcctggactcagacacagaatagtcacagactggtgaccagctttgcttactctcttttcgaaacagtctggctctgttacccaggctggagtgcagtggtgtgatcttggcccactgcagcctctgcctccagggttcaagcaattctcatgtttcagcctcccgagtagctgggattatagacgcccgccaccacgcccagctgatttttgtatctttagtagagatgaggtttcaccatgttggccagactgctctcaaactcctggcctcatgtgatctgcctgactcggtctcacaaaatcctgggattacagacgtgagcctccacacctggcccacttagtcttactgacaaaactagaacccagagtctcccggggcaggtgatacctggtttcagggtctcctgcctcaaagcccaatgggaattgtggttgtagggctggtgccgtccagccacacagcagttgtggtaggttgggggccggccccaacacccttatggagggggcccgtcatgactgctcggcccctctcctacagcgggggatccacttctccattgtgtctccccggaagctgcctgcgcttcggcttctgtttgagaaggcagcccccccggccttgctggagccgctgcagcctccgacagatgtgagccaggacccgaggcacatggtgctggttcggggactcgtgctgcctggtgaggcctgggcaccgtgcgcggggatgggggctcgacgtgtttccccagctccctctgacttggattttggatttctctcctttctctgcatcttgaatcccttctctctggggttggccatccctcctgctctcagttgggggtggctcagccccaggccccctccagtcaaagcagccagtccccctgcctcccgccgcaccctcaggtgccactctctcagcagccccccagcagcctctgccccccgtccccccgcagtaccaggtatggatatttccgggaagggacatgcttctggggacttgctggagccctggcccctggggagaaatctagttgcatgttggagcttgtgggatgatgggagtcccatgggacattgggaaggtgggactcttggggccatggaagctcatgtgctgtgtgatgggtgttgtgagctaagctatcccagctggtgcctcatggggccatgggtggtgtgacctcgtgggataccaggactggggggccatggtcctcaccagtcccttcccttcttcccttctacccacaggttcccgggaacctgagtgcagctcaggtggccgcgcagaatgcagtggaggctgccaagaaccagaaggctgggctgggccctcgctgtgagtcctggagtgaggatgaagggcgggcaggggccaggcaggcctctctccacacacttgttccccacttcttcccttggtctctcccacagtctcgcccatcacccctctccaacaagctgctcccggagtgggtccccccttcagccaggccccagctccccaactacccccaggaccccctggcgcccccaagccaccacctgcttcccagcccagtctggtctccactgtggcccctggctccggcctggctcccacggcacagcccggggcaccgtccatggtaggtgcctgcacgcctcctgcccctgctccttcctcctgctgtccacagctaggacagttagaggatgagtcatttgccttccagggggatgtggctctcgtggttctggggctttgggggctcgtggtgtgtgtgctgcagatgcctgagatgagggtctggggacagagtggggaggctcatggctccaggagggtcagggctgttccgagaaacccaaggaatccctgggtctgggagtccagggcatcgcacagcttacgagtcctcgaatcctgcaaggtccaagcatttggggtcctgcggctggccaagtgctgttctggggatggaggggcagaagaagggatctttcctccttcctggtttgccctcacaggatggcccccggaggctcccggccttccccattctcatggccctccttcctcccctctggcaggcaggcactgtggccccaggaggggtgagcggcccttccccagcccagctgggagccccagccctcggtgggcagcagtcagtctccaataagcttctggcctggagcggggtcctggagtggcaagaggtgaggggcctgagggtccattgggcacttgggactcctggggccgtggggctgggcatgtaggactcatggggccagatgcgtggggtctgcagtgctgggtttggaggcattcgttgcgctggacctgtgggatgcggggcgaggccaggagccccatggagtggtgggacttgcggtacagaggagagtccccatgcaaagaacccagaaaagcccaggatttggggcccagagaagagcccaggcgatgtatcatctggggcacagtggatggtgggatttaggggccgggcacgtagctgtaacatttgaggaactgaaggcttgctggtctggaggaggggcctggggctcatgggacttaaactggggaacatcctgagctttggggctaccagggtaggacatgagggctcaaggggactgaggcttatggccctttttactgacatgctcttttttccccctcagaaacccaaacctgcctcagtggatgccaacaccaagctgacgcggtcactgccctgccaggtctacgtgaatcatggcgagaacctgtaggtgacagtcaggggcggggtgtggtggggctggggctggccccctcctcacacctctcctggcatcgcccccaggaagacggagcagtggccccagaagctgatcatgcagctcatcccccagcagctgctggtgagtggcggtggagggccagccctgctgccgggcagtcctcaccctgctgtctctttcctgttccctgccccacccccactccctgcctcatgtccccgcctcacttgcccacaccagcatgccagccgacttctgtgtctcccgcagaccaccctgggccctttgttccggaactcaaggatggtccagttccatttcaccaacaaggacctggagtctctcaaaggcctctaccgcatcatgggcaacggcttcgtgagtccagggcatggggggccgaggggtgttgactcttgtcctgctttctgctgacctttgacgggaatcccagagtgcctgggcccacggaagccgtttttgatggttgggtgcacttcatgcccttaggttcctcgcctttcttctagagccgtgacttttattataatcatcgtatgcaccagatttgagggatattccacattaaaaatgtgagctggatgtgacaggatcagttaggaggaagctgttgattctggcatggctttatgggatgtgttcatttcctgtggctgtggtaacacattaccacaagcagaggggcttaaaacaacagaaacgtgttctatcccagttctggaggccagaagcccaaggtcagggtgtcagcagggccacgctctctctagaggctggagggaaggcctcttcgttgcctcttccggccggtaaccccaggcttcaggtggcatcgctccagggtcttcctccatcccgcagctgtcttccctctgtgtgtgtctccacatggcattctctctgtatctttgtgtctgtgcttataaggacatcagtaattttggattaggccccattttcctgacctcatcttactacaattgcaaagaccctctttccagatagagtcaccttcacaggtgctggggactggaacctcagcttagctttctggttttgttttttgagacagagtttcactgttgtcagccaggctggagtgcagtggtgcaatcttggctcacagcaacttccgtctcctgggttcaagcgattctcctgcctcagcctcccaagtagctgggattacaggcatgtgccactatgcccagctaatttctgtattttttagtagagacagggtttcaccatgttggccaggttggtctcgaacttctgacctcaagtgatctgcctgcctcggcctcccaaagtgctaggattaccggtgtgagccaccgcgcccagcctcagcatagctttctgggagtcacagttcacactttgtaactcggggaaggagcagatcagttacttccgtgcaccaggcactcctgcaggaaagagaaccttagggggatcacctcacgagaccctcacagaaccttgtgaagaaggcattcctgagagttagtacttccggctgcaaatcacgtagtttcccaaacacatagataattgggggcactcggaaaaaatgttctcttatgattctgtgggtcacctgggctcagtgggccatctcgcttggcgactctcacggggttgccatcagatggcagctgagactctggtcatctgaaacctttactgggctggatgttcaaaacagctcctcacacagccctggctgttggctggggcttggctaggaccggccatcccagtgtctgcacatggcctgtccacgtggccacactgtggcagctgggttctgagagggcaggcgttgtaggagcaggcatttatattttgcacaggacaggacatctagagggggccagctattgggattggtttcataggtctgtgacatcagggacagggccctgtggttctcttggcctctcctttatagtcacaaggtagctctcatggctccacgcatcctgtgtgctttcatgaaggaggggaagggggctgtgtgtttccctttcttcaagacagcagaaactttctcagattccagagcaggcattcctttcacctcctatcccggacctaggccactgggcagcccctagttgatgggaggctgctgggagcaggtatccgtgactgtctggggctgggacatgttacagccccagacagcattgggaatgcaggggaggaggacacttggatatggaataggcagctagcagggtctgtctcaggcaggaaaccgaggctcagagaagtcaattcacttggccaaggtcagcctcgcctccctcaggagcccctgccctgaatgctccatgtgttacccccctgatgaccagtgatgtttcctgggtgcttcctgtgggctgagcctcaggcagggctcttgctgtggatcagacatcgcatagtcacagcgaccctgtgatgtgggagcactccccgtggtgtacactggccggtgctgagggctggaggatctcttggatacccggggtccgacccaccgttgatcacaggcctgtgggtaccacgctgtgcatctaggccgctctcccggccgtgaccctcagccgccctctgaggaggccgccgtggcattttatgcccaagaaactgggtccatgaggagcaggtggtggctgaaggttgaagagctgggctccagcactttctctccgctttccctctcagtgggcagctggaaccctagcttgccctgagcgcctcagtttctgtctccagagcaacccatagcacacctgttctccttaaccttctatagcagaaacctcacctcaccttgcctgtggggcctctagagccttctggaatggggagggggtcagggctgcctctttcagggcctgaatggttctgaagagctgttgtccacccaggcgggctgcgtgcacttcccccacacggcgccctgtgaggtgcgcgtgctcatgctcctgtactcgtccaagaagaagatcttcatgggcctcatcccctacgaccagagcggcttcgtcaacggcatccggcaggtcatcaccaaccacaagcaggtccagcagcagaagctggagcagcagcagcgaggagtgagtgttgacagtccccaaaccagcactccgaccccctcctgcccgggccccacatggccccctggggtctccaggaccaagatgcccacccttctcccaatatgtggtgcctccaagctaagtcccactcagattttcttgcagtctctctcctttttcagcatccacatcaaagccctgacacagcttcctcctggagaccttggagtgtacggcatccctcccagaccactcacccccaaagagaatgtccccatctccttactagttcccctcagggcacaggccctcccgcctcagattcaggatgccaccaccctcagttactgacctgcccctctctccccgtgcagatggggggacagcaggcacccccagggctggggcccattctggaggaccaagccaggccctcacagaatctggtgaggacagggctggcggggtcggggctgggttggggaggccccaaggctgcgctctgtgcctgcagaaggggcgtgaggccctgcccatctccctcacccctgtgtctcttcccaccagctccagctccgcccaccgcagccccagcctcagggtaccgtaggggcctctggggccacggggcagccccagccccaaggtactgcccagcccccgccaggtgcccctcaaggccctcctggagcagcttctggcccaccccctcctggacccatccttcggccccagaaccctggggccaaccctcagctgcgaagcctcctcctcaacccaccaccggtgagatgttggggtggggtagcgagagttccagatcctggccctggtggttctggtcctgttgtctgggaggagggaggttgactgtggtcagtgggtgtgaatggggacccgcccagggctttaggcagaaggcagaccgcctcctctccgtccatcccccacctttgaagaaaaacttcccctcaccactagctgattccatctctgagcagtgtctgtgttgagaggtggggagtctctaccaggagcctctgagccactctctgtgttctcccagccgcagactggggtgcccccaccccaggcctccctccaccacctccagccaccaggggctcctgcgctgctgcctccgccgcaccagggcctggggcagccccagttggggcccccactcctgcatccaccacctgcccagtcctggcccgcacaacttccccctcgggctccactgccaggtaaggggacccgggggagggcagaggtctggactgagtgtcccagcagctcctgggctagagcaccaagaccgagtgctcctgggaagtaaagacataggatccaagaatgagggttcccccatggcctttgcggagctctgagggctccgggaaagtacagcccatgggtccaaggacctagtgggttaagagcgtttcccatgatcctcctgtgtgtgctcctgggattgctgggaaatgtggtcttagggccagagaagtagttttggagaagggcccccaaaggctcatgggaaacagcatatttgtaactagatggggccagaaggtgcttctgttgggtcccccaagggctgcctagaaaacttagtgcctctgggccctcctgggcccaagggcctactgggagatgcagtcccttccccactgcccctcaggtcagatgctgctgagcgggggtccccggggcccggtcccccagccgggcctgcagcccagcgtcatggaggacgacatcctcatggatctcatctgaatccccaacacccaataaagttcctttttaacacacgccccggctcccgtcactgacatccctcaggactgggcaggaggaaaccccagggggcatctctgtccttgttctcacttcagcagacatccctggggccctgggtgaatgacgctggggcctccgtggtgagtcacaggcagtctggtgcaacctgattcgtgggagatgcagggacaggcaggcagcgctcaggactcaagctctcatggaggtggcaggggcaccatgggagcctggaagaggcatctgacccagccccagctcctcagagtcttgaaagagaatcagccgtcaggctgggagggaaggaggtgaggggtgatctgggtgcagaggacaacagaaactttgaatactcaaaggcaggaggaagcctgagacattgagaggagcaagttgatggatgcttttggagcatgagcatgtagggagctagagagatgggcaggtgcagagtttgaggagctcggattccaaactgagcagcccatggtttgtcctggggacacaggagaaccaggaggctttgagcagtggggcgggcctaggccagctctggatgtcagaaagacccctctcagctgtagagcgtgatgaggccagacaggaggccaggaaaggtgaggctgggtggtggcggtgtcgggggctggggtagaggttcgctcccgggggccaggcctacgtgatggtaggtggtggggctcctgggagaaggagctggtagtaagtgcaggtggtccaagggacatccaggtgacaggtgccatgttgggagctcaggacgtgtccttaggggacagtgtatgtttggcagttcaagccacagaagcagacaagatcgcacatggagagagggcagtccctgggtccatgtcagagactgaccttccagggctgtggatggggaagacggtgggtctgtccccaggatagaatacccagcagggaacaggtttgggacgtggcaaggtgagggacctgaaggatgtcctcagagacgtcccgagggcagggggatccagacaggcttggagcgcagggtggtctctcctggaggtggtgagtgagttgtctgttgttggactctggaccagtgttgctgagagcgcggtccatgcctggaccaccagcatccacatcattttgcatgctggttaacgtacagattcacgggccccaccccaggagagagattgcaatctggtggcctatgggccatcgtgcggatgagttttgtttggccttccctgtgttagcatatgtggcatttttttcttacgagttagttgtaaaaatcaggttaattcacacacacacacgcacacacacaaaatctgcagtcttggcttcttttgacaagtcagaagaattggcacccctgggcccgcccttctgcctggcaacaatgggctggagctgcccctctccatggggcgtgtgctttctggttcgccacagtccccaccactccctcttggcttccctgtgaggcagagagtcactgcctttgtcacggggtttgcactgtggttgttctgtggtagcattcagaggaaagtgaaatctttcttgtacccatgtctctatcacaagcggcaaaacgaaagagagaaggagagggccgtgtgtttcgagaaaaatgggagcgagcctatttctttgtggaagtgaagagcatgcctatgtgtttaatatgcaaacaaatcgtgtctgtgttgaaagaatacaacctgaaacgccactatgaatcaaagcatagtaagagctacgaccagtacacagaacagactcgagatgccatcctcaacgaactgaaaaagggactcaaatgtcaatagggtttgttttgaaaagcgaattaacagaagtggcgcggcagtggtacgccgttccggaatcacgtgagaagaatgacctgggcattcagagctacagcagatggcaagtttataaaggagcagagtgacgtgtcctgcacagaaacacatgactgttgagaccgttatttaagtctaacgggcatttgcgttgcacagtgagttggagataactcgggggatttacaagtccagttgcttgaaagagtcaaattgattgtggccttttctttcgctgctcataaactattaccacccagttagctttatttatttgtggtgttaagaatcttgatgtgaccgaagaagtctgtggcatggtgccaaggcaggcccaacactgggaaaggactaattttttttgtatattgagagaaaagtttcacatagactggccagagttccgaagcacaactacagacagcgtcatgacagggggacttggcaggacaccttgatccaaggcgacagcatttggcaaggacacggaagttgggtcgttgcatccatcatcaggagttgacttgttctgagcaactgaacagaacacaccgcgatgctctcgacacttccgctcctggacttcagtcacgagtgagttgatggtgacttgacctgagagatttcacagaagctctgtgacttggttgtggaagaaatctgaactgttcaagttaaccaacttggttcattttaaatcaggcaaaagccacagtgggttcccctgagaaggttagtcaaagacttctggtcaaggttatgaccgttctgaacactgaatatttctccgcaaggatgtccacaaacagctacttgaatgtatgatggtgtatgcttggtcctggggaatccaccggcaaggaaaaaaaacctttactctttcctgtgctgcagtcggctttcagaaatgaaagaggtggcccggactgtattcacctacgtcctggggttgaagaccaaattcccccaaaggctctcggaatccagactcatgagaaggaacagacattgtccagtttgcctttgttggcagatgtttcttgtgtgaatgcagaccataaatagtaattgaactacagtgcaatacggcgctggttcctaaatacaagtctgtgtgaagatggtgagattctacaactatctccagtagttgtcctgaatatctgtgtttgggagtacccacgcttgtgaacagctgttttccgttacgaacctgaatcaaattaaacatcgttcccagttgaaggattcaaggctgaattctaaactgcccgtccccaccgtgccacccgaggcctgacactgacatctcggtgtggaagggaagacgccagccttttggcttcaactcaaaggcgcaaaaagaattatgaaagagaaaattttaataattaaatatttctatttttcaatttgtattttttcaattttgaatttaaaaatataaactccagtaacatccatgtttgtattatgttccatgcattcaccatagttgagtaaagatccgatttgatgatatttctggccgtcgacttttcttatacctggctagttcactcatttatgtgacccgcctggcccctgtaggcatgtgagtttccgatccctgccctggaactgttggatccagtggggggagggcgggggtctgggagtcgtgtgagcaagctctctaggcgatcctcaggaatgtgagtgtggagcaggaggcactggtgacagcgaagaagtgcaagtgggtgatttcccaggcagcctgtgtagcaggggtttttgaaaactcagatggcttcagggaccaggcaggtgatgaaaatgtgtgaagcggacgggtgtaagacaacagggaatgatggggactgtggcgaacttggagagtgcttgccccgcctaatggcattcaaattgaaaacaaaaacactgtgaggaccaaacaaaatctgcctgtgggtctaatgaggccgccaggccgccattttgcgactggaagaaggagaagactcgagaacaaggacagaaccctgagaaagagccacgcgtaagggttgggcagggagccagaagacaggagaaccaggcaagtgtggcgttctggaagctgagtgtttgaggagggagcaatcgactctgtcagaagccgctgagaggagcaggaagcagccttcagtgtttccaccagggtggccatgtcccccggcaagggaaacgcaggtttggatcagaaacaaattggttaaaaggaaaggtttccagtcgccagtttggccatctcatgccagtggcgccctcttgaccttaacactcaaattagaggaaccagagggactgtcgtggcctaatcacacggtttacaggagtgaaccggggcttgcttattaatagtagcagacctgttaggggtgaaagaaaatgcccacccaccagctccaaagaggaattaggagaaaaaggacacctcaaaaggggtgttaagaatgtatttgtttcaaggtacgcaaaacactaacatattttctcaccatcttggcatttaaaaaaaaattaacttttaaaatgtattaagttacacacactagaacagtttcctaa[139 bp omitted]tatggtgaaactctgtctttactaaaaatacaaaattagctggccatggtggcacatgcctgtaatcccagctacttgggaggctgaggcaggagaatcacttgaactcgggaggcaaaggttgcagtgagccgagattgcgccattacactccatcctgggcaataagagcaaacctccatctcaaaaaaaaaaaaacccacaaaaaaaaaaccaaaaaggaggcccaaggaatgaggccagatctaggcacatgggactcacctccccatttcataggtcaggtgacgataaggcctaagaacttcacatgccccttagaaccagccaacaccaacagagcaaatcttttgggaaagtttttccctgaatacaaggttctcctaaggcaagaaatagtgaaaaccctagaacagcagggtttaatcccaagattctgcgctgattagctctgtgacctcgggcaggtccctgcatgtctctgagcctcactttctccatatgtcaaatagtgactaccccagaggattctcataaggaatacaagatctggcccagctcagtcctggacacaggagagctgctggtagccactgttgtcatcttttggctgaaatgcactctaagaaggtaaaaggtgggcaaaactgcttctagaaatgcatgccaagctggacctcacgcctgtgatcccagcactttgggaagccgaggtaggagaatcgctttgaggccagggtttcaggaccagcctggcc[131 bp omitted]ggccaacacggtgaaagcctgtctctagtaaaaatacaaaacttagttgtggttacgcacacctgtaatcccagttacttgggaggctgaggcataagaatcgcttgaaccccggaggtggaagttgcagtgagccaagatcgtgccaccgcactctagtctgggtgacagagcaagactctgtctcaaaaaaaaaaagcatcctaacttacaaaaatcacttgtgtccagaaaggttataattgagtgagtgacttgttggaaacattttctttttgaccagtttgcttttgaatcatgcatcatgactggaggcaagactggggattcatgaaaattcttgcaaaggagcaggtggtaggacgtaattggaaaaaagtgattgttgaggcaaaaatgctaaaacaccaacatattaatagttggaaacctgttcggggtgaaagaaaatgcccacccacctccaaaggattatgagaaaaaggacaccttctcaaaaggggtgttaagaatatatttgtttcaaggtacacaaaacactaacatgtattttcttaccatcttggcatttaaaaaaaattaacttttaaaatatattgagttacacacactacaacagtttcccaaaat[132 bp omitted]gccaacagggtgaaaccccatctctactaaaaatacaaaaattagccagcatggtggcatgtgcctgtgatcccagctacccagaaggctgaggcacgagaatcactagaacccaggaggcagaggctgcagtgagcagagattgtgccactgactccagcctgggagacagaccaagactctgtctcaaaaacaacaacaaaaagtggaactaccctatcacacctcactctcgcctctcctgcccaaacacacaccctgagcaaaccacttacctccctagaggctgatgtaccagttctgcatttgggtttacatgcatgcggttgtggatatatttatagtttaatttttttgtataagtgagtcaatttctttgttctttagcttgcttttttttttcttccaaccaaagtaatggccattatttatttatttatttatagacagagtctcactccgttgcccaggctggagtgcagtggcgtgatctcagctcgctgcaacctctgcctcccaggttcaagctattctcagcctcccaagtagctgggattacaggcaggagccaccatgcctggctaatttttcgggttttttttttttttttttttttgagacggagtctcactctgttgcccaggctggaatgcagtggcgcagtctcgactcactgcaacctccacttcccaggttcaagcgattctcctgcgtcacccttccgagtagctgggattacaggcgcccaccaccatgcccagctgatttttgtatttttagtagagatggggtttcaccatgttggccaggctggtttcaaactcctgacctcaggtgatctgcccacctcagcctcccaaaatgctgggattacaggtgtgagccaccgacctggcctgcctgcactgttaattacctgttcctctatgtccccacttctcatggtggcctcaggtagtgcactaaatggacgcatttcagttccacgagccatcctgcctataagttatctgttgtgtaacaaaccccaccaccgagtggcttaaaacaagaagcatttattgcctcaccgttgctgggggtcaagaatccaggcttggctgagctgctggctcccaggctctcggggttgcggtcgagctggtggctggggctgtgcagtcatcggaaggctccgtgaggagggcccacttccagcccactcacatgcctgttggcaggattcagttcctcacaggtgatggggccgagagcctcagttcctagctgttggctggaggtctcccttgttttctcgccgttgcaggcctcttcacagggcaccttgcagttgcaatgtggcatccagcttctctagaaatatgagaagggctgggtgcggtggctcatgcctgtaatcccagcacttttgggaggtcaaggcgggtggatcacctgaggtcaggagtttgagaccagcctggccaacatggtgaaaccctgtctctactaaaaatacaaaatattagctgggcgtggtggcaggcatctgggaaatcccagctactcggaatgctgaggcaggagaatcgcttgaacccaggaggtggaggttgcagtgagccaagaacacaccattgcacaccagtctgggctgcaagagtgaaactgtctcaaaaaaaaagaaaaacagaaatgagagaggacgcccaaggtggaagctgcagtcttttgtaacccaatcttggaagtgatatcttgtcactcttgctatattctgtacattacaacaagttgctaggttctgcccacactcaagctgagaggacagtgcagacaggaggtgagggtcatgggggctgtctttcagggtgcccaccacactgcaccctgccagttgagggcctgtccagtttttcttttatttcttctttttttttttgagatggagtctcgctctattgcccaggctggagtgcactggtgtgatctcagctcactgcagcctccgcctcccgagtagctgggattacaggcacataccaccacacccagctaatatttgtatttttagtagagatgggattttgccatgtt[135 bp omitted]tgtatttttttaacccacttgtgcaggcattcctatgggatgcattcccagcagcagaatttcaaaactaagtatgccaactttatttacatgacccaaaaaatgttgtattcatgtttcgcatatacgagaaaccttcctatggttcacacttggaggggctccagaaaccaaccaatgcagtctctctcagctccctctagagatcagttaccaattgcttaagtgtcttttcagagagacgtataagcaggtacaagcaaatagagaaactgattgattttctggcttttctatccagtggcaatctcctttattctatcatttttttgtttgtttttcaatctaacaacatatcttgaagtttggacaaaaagccttcattttatttatttttaaaaatagcccagggggctgggcacagtggctcctgcctgtaatctcaaacccaggacgctgggtttggggatagggcagatgtatgtcttttacaatctgggaacactcagcatggtctgtgctggagggcagatggtggcagagaggctgagaagcgcggcagtgacgagggtaagacggtcccaagcccgaggggcttggccccttgtttattccacaaagtggaggccaacacctactgagattaagaacctgggccctgtccctgtcccgtgtctccgcagcctgtgacgtcaggcttttgcttccagatccttggtttccccatctgtggagtggggattaaaagattgttgaactcatggcctgctgtgtgagaattcagtgagttcagacatgaagttcttgagaaatattaactactattattgccaggggtctcactctgtcaaccctggagtgcagtggcatgaccttggttcactgcagcctctgcctagaggggtcaagcagtcttcccacctccacttgtcgagtagctgggactacagacacgcaccaccatgcccagctaatttttgtattttttgtagagacagagttttactctgttgctcaggctggtctcgaactcctggcctcaagtaattctcctacctcagcctccagagtagctgggactagagacatgtaacaccacgcctggctagttttatagttgtagagatggggtcttgctatgttgcccaggctggtctcaaactcctgggctcaagcaatgctccaacctcagcctcccaaagtgttgaaactacaggtgtgagcctctgcgtctggacacacacgatgatgacaaagttgaaatacctagagtttgcaaagcatgtatcaggcagacctttaaaaaaaaaatcagccataaactattttgtaattgcaaagaaagaaaagaaaaatccaagccagagatgatcttactcccatttcttagcataaagcattttattatcttttttatttgtttgttttgagacggagtctcacactgttacctgggctggagtgcagtggcacaatctcagctcaatgcaacctccgcctcctgggttcaagtgattctcctgcctcagcttcccaagtagctgggattacaggcacccactaccatgcccagctaattttttgtatttttagtacagacatggtttcaccatgttggccaggctggtcttgaactcctgacctcatgatttgcccgcctcagcctcccaaagtgctgggattacaggtgtgagccaccgcacccagcctattagcattttttgagacagaatgtcgctctgtcgcccagattggagtgcagctcactgcaacctccgcctccccgggtttaagcaattctcctgcttgaattggaggatcaatcaggagactgtatttgtattcctgagtagctgggattgcaggcgcctgccaccacgtctggctaatttttgtatttttagtagagatggggtttcaccaggttggccaggctggtctcctgacaacaggtgatccacctgcctcagcctcccaaagtgctaggattacaggcatgagccaccgtgcccggccagtataaaacactttgtccatgttgtcattgtgtcctagcctatgtcatccaacctatatgtactgccagtttgttcttctaggaaactcagacttggtagttgattggtttaacaaatgttggttaaactgggattatttgggaaaaaaaaattgtgtatatcaggaaaggccagattacccccagattgcagtggcttgaaacagccaaggtggattttgtcactcgtgctgtattgagtgtcagcttggagcccgtgcggacagatcatgaaggttgccaatggacatagtaaaggcagaggggtctggtcttccattagcaattatgtgctcttgctgaattcacatgtgtcacttctgctcatatctcattggccagatgtaatcacatggcctcacaccttactggccaaaattaatcacatggccgcactcaagctaaatggggtcaaatgctggccaagtgtggagctagaaatatatggcaaatagcactaacggccatcttaacactttaaacatcttattttaaccaagaacatttaaacagacatctcttgtacgtaggaccaagaccctttctttcagtattggtctcctagttagcacacgacattacattcttgtttttgagacagggtctcactttgtcacttggactgaagtgcagtggtgtgaacacggctcactacagcctcaatctcctggactcaagagatcctcccacctcagcctcctgagtagctgggaccacaggtgcatgccaccatgcctagaaaattattgttgtttttgtagaggtgggagtctcactgtgttgcccaggctggtctcgagctcctgggctcaagcaatcttcccacctcagcctcccaatgtgttgggattacgggcatgagccactgcgcccagtagaacatcacattcttgtataagctccacccacaaaccacaatgagtcatttttttaagtggcttgagaacctaaagacatttatgaaacaaactgggggctgagtcttcctaggtttttataagctttttcattaaataatttacagttgctttacttgtacctaacttggcagcatttttttttttttaagagatggagtcttgctttgttgctcaggctggagttgcagtggtgagatctcagctcactgcaacctccaccccctgggttcaatcgattctcctgccttagcctccagagtagctgggactacaggcatacaccaccatgcccggttaacttttgtatttttagtggagacggtgtttcaccatgttggccagactggtcttgaactcctgacctgaagtgatctgcccacctcggcttcccaaagtgcagaattacaggtgtgagccaccacgcctggcatgtttttcttttaacaactcccttttagtctttccaaagcaagcaatctggtttgtgtataaacaactgtcttgcattaatttcattagtttgatagtaaattaaacaagaacttctggcataaacaggtttggatcaaacagctacctttcaggaagtaaacagcttgagagatggaagtggaattgcttagtcataatagtagcctgctagccccagcagtgggcttcacagatgaaaaggaaagtgtctttcaagttggtggaccgagttaagtgagatggtttcagagagttttgttgcagtattactgatagaatttcagcctacattttcatttcactttctgacatgagttcccattttgctcactctggagtacaccctggtataccgctctccatgcttatacaattcagggcattcaaactcacgtgtgtcctgatgggttctgagggatgggaaggcattaacaggtagagaacaggaaggatgggagagagattttttggggggcggcagcaggggccacagtaccaagtttggatttaattctaaaggcactgggaagccattggatggttttgattattgtagtgacagagaaggcagcaagagttaggagacgtcacccaggcaagagatcttgatggtttggaccaacaagaatggggagaagtgaggattccgggagattaaagcagctcctgttttttctccttcctgctgccaggttgtcctcacatgggtgattgacagggcattggaggtacctgttgataactaacttgcagtttgtgttcagggagcactgactccgtttggccacaatgcaggttggatttggggtttaaggctgggctccagtcagccctcgggagcccctgggcaggaaaacatggacaggcctacgggttcttctgccatttcactggccactcctccgtgtcctttgctggttgcttctcattgtcgtgactgctaaagggatgagtgtcccagtctctttgtgagctcatccagtctccattcaaacactgatgactcccgaatttctctctccaggctatgacatcaatatctatctacattgtttagtcaacatccgaaacagaagtagggactccgtctctaacctcctacagctgtgtctatttctcctctctaccttcactcgactccgcccacactggctcccttttattccttctactttcaggatttgtctttgctgttctgtcctctttgcacacttttccagccatctggaatggcaggttgctcacaggtcgttttcttgacttcccttgcttgctaactttacctcgctatggtcatatcccatcgccctgtggatgtgcgctagttaacacttagcacagcctgtgattatgtctctccccagtggaccgtggggcctgtgagggacgtggtctgattcggtcgtcgccgagcacagaactggacagggtactcataacagatttttgttgttgtttttaaagaaaagctaacatttgagtagtgactgcgccaagcagtcaagcacagcccctcgggctcgatccccataaccactctagggttaggtattacccacgtttaaggaacaaaaatcgagggaaaaatcttatacaactactagtaagtagtcattccattttagcagagcgaatgagcgaatccacggaaggccggggagcgacgtgagtggcgagaagcttggagtcgccagggacggcgggcggagcctgggcgccggggctaatgggcggagcctccagggacagctggccccgcccaggccgcgcggggcccgctgggagttggagtcccttgcccacctcgccacgtcaccgactgcaaaccttcagctgtctcaggctcgggtgcaatccgtaccctcagtgggttccctttcagtgggttcctttgtccccaggcccattattccgtcctcccctcttccctgatgtattttggcgcggtctcctggctctgcgggcccagggctccggatgaggtctcccgccgtcccgacccccgcaaggggccagcttggtgtcgccttcgttcttctgccaccccattcggtaggggctcccgttcccgccacgccccctgaagttgtggctcgcgcgtcttcccaggactcccccgcgccggagaggcccgcaggaccgccgagcccacactccgctcccgcccgggccccgctcccccgcgccgccttggtacgctccggccacgccccctcggacgcgcttggtacgcgccgggctcccccgctcgcctcagtggttcggccgcggcgaccccactccggcggcgcgtcccccgagcttggtacggctcagcccgtctcccccgaagccgcgcgcccgcgcccgcgcccctcagtcggtggagcccgcagccccccttgtggcccgcggcagctccccgcccgctcggcccgcgcccgccatggtccgtccgcgccgtgccccgtaccgctccggcgccgggggccccctcgggggtcgcggccgccctccgcggcccctcgtggtgcgcgccgtccgctcgcgctcctggcctgccagcccccgaggcccgcagcctccgcggatccgggcccgctcggcccctcccatggtgagccccccgccctttttccagagccttccacggccccgcccccccagcccctatcccgggctcacgcctttgtccgcagcccccgccgctccggggtgtcccctgtggcccgaagggtggtcccgcccggggccgggttcccccgtggagcacccggtggttcgcgccgcgctctcccctttgttgcgcgttcgggccggggtggggggttgggggacgggggcggggcgggctcatattactgctgactccgcggcccgatttaaacgcgggctgggggcggcagacaggcagccggcacgctcgcttgtttttcctattggagagttgctcgctctccgggcaggaaacctggaaatgggggcggttttgggggacagcggcgagggaggggcccgcgctttgtaccagcgcccccagatgtcgcacccgtgggcgttctcccctggcggccgctccgtgcccgtggagtgcgcacctagaatacgcgcccgcgcccacatgtgggatgctttgatggactgccgtgagcccagaccttaaacgtaaacattcagcttcgcaggtactttgggctgcacacgcttctccggacccaaaagatgcacatgcttttcagaaaccgtaaggtttacctggggctgtaaaaccgcacatcgcgactttgcaccgtgcacacgcttgccccgatgtgagatttcccctgggttcgcgctcgggtccgcttcttaaatacactgcctcagcggtgtggatggcacagagctgtggcagccctactgaaaccttaaacaggcttcctggggtcataaacatggataccgagacttagatcacctcccacaacttaaacgtaccccttcactccactgccttcgccccttcctgcagcattcgcatctagttgttcaaaagtgctttccgggtcctcagacatgcaccccaaggttttaaacctcagtgcaagtactagatgggcttccctgtgcaatagggatgtcaggcgcgcagttttgcacacgattgccaagatgtgagatttactttaggttgcaccttaaccgtcgtttttaaatatgatcgtcccatcttgatgtgctgctcctgctgtggaaggtatccctgggttttaggcaagcatatgtgttctttactatggctccagatcccagcatatttgaagtcctgagtcaacctgctctcctagacaagcagacattaagtatgtcgcttgggctcttaagtgcgttctcctgacttttacccatctttgtggcagtaaatgcatacgtgtcactgtatatgcggactagatacctcaggtcccagcgccataaacaacttgtatgttgtaagtgtaccctcatctcgaaagtcacctccagctgtgcgttttaactcatctcagatgctggatgtccggtatggtgcctgaagcccccggggcaacatccactctctgtccaactcattctaacgccaagatactcaggttttctatctgatcttctgacgactgcccaaaagtcagaatcacctgcgtgggtgaagaatcacctgcgtgggtggagaatcacctgcgtgggtggagagcaagtttgttcaggtttttctctttttaagcactcacaaaataaaattttttgtgtttgctagtattctggaaggaaagatctccttgtgcttcatagaaaatttggaaaatacctgtttgtaataagataaaaataaatcacccttataatttgttttcccccgcctggaggcgcctattacggggaaactctcgtgggtttcctgctgccaggctgtttgcggagctttcccttgtttgctttgagat[134 bp omitted]accccatctctactaaaaaaaaaaaaaaaaaaaaaattagccgggcatgatggcgcggcttgcagtgagcgaggttgcagtgagctgagatcgcaccactgcactccagtctgggaaatgagtgaaactctgtctcaaaaaaaaaatagtaataaaaatagtggggagagtgcctgtgagtagcatttgtggcgttgcttggctttattgctagaactttctcttggtgttctacatgttttggtctgtgagacccctctgggggtggtgtcccagctgtcttccaaatgtttcccccttttcctcgctgtctttctcctggatggtttagtcccctctgtgtttcttgtcatctccttcctgcctccccccggggtcagacttataaggccagagaggtgggcactggcctgagccagaggaaggaattgaactttgggatgacagggagctttaggagagtttcagcctgggaaagacagggcaagctggtgtgtgggacagacacagcgcaagccggcttgtgcctgtggaggctgcaaggaagccctgggcccagcctggggcacggggaaagccccctacagctggcttctaacttgggtctcaagaatcgatcaggcgcacagctggggcaaaggctggaggtggggctggctgaaggcttcaggactctgctgggccagtgtcaaggtgacagcaggctctgggaaggaagggtcctgagggtgggcagcgggaaaggacatgaggaccagcgtgtgggggtcctgaggggtgagcagagggtttggacatggccccgtgggcttccagcaggggatttggggctgaatattgggacgtcccctctggggtgtgtggggactgcctgtccttgcaggccccggcctcagttttcccacctatcccccactccattgcaggaaggtgctcgggtcttcggggcactgggtcccatcggtccctcctcacctgggctcaccctcgggggtctggccgtgagcgagcaccggctcagcaacaagctgctggcttggagcggcgtcctcgagtggcaggaggtgagtctctgtggggctgcggctggcctccagggtcttgtcttgtccctgcggggacaggccagggcatctaggctgtgcacagtgacgcccctcctgcccccacagaagcgcagaccctactctgactccactgcaaagctgaagcggaccctgccctgccaagcctacgtgaaccaaggcgagaacctgtgagtgccggggcgtggcagccagggcggtggcaggggcagtggctgtggccgtggggatcagggcagccctttctgaccagctccttcccatagggagaccgaccagtggccgcagaagctgatcatgcagctgatccctcagcagctgctggtgagacccgcccctcccaccccatccactctgagcacccccatgcctggctgacccagctgtctgtcctgtcgcccccagaccaccctgggccccctgttccggaactcccagttggcacagttccacttcaccaacagagactgcgactcgctcaaggggctctgccgcatcatgggcaacggcttcgtgagtggggcgggctcccttgtagcactgtggtgacaagtacagctggaggcagcgctctgctcacacagtccaggcgggggtcggggggtctcccctggggccgagggtagccctcgtggcctctcggaccccatctggaaatgactgactccaggcaccctccgtagagcacagggtgaaggaactcagcctgagaggcctccagtttctgcatctgtgcccagcttcgaggtggccctgggggcgtgagtgcagggagggactggggccagccctgttggggcccaggagcctgtcggggacacatagcgtatggcagggacctggtaaatgggtgtgctaggcacaagagccagccaggagggagtggcacgttggggcttggtattctggtctgtaaaatgggctaacctccccgagtggcctgagctggccgtgagggagcagagctgagggtgctgaagcaggcgcggtgagtaggtcctcaggcctggctccaaggggacccaggtatccagccagtggctgtgcagggactgagtggggcaggcgcggccatgacctggacccggggggctgccaagggatctgagagcggcttccgcagcactccagggttgggctggttgaggggtagagatgacattttctgaggtagggaggacaggggagccgtgcttcctagggccaccgggaggctggagggagggaatttgtgtaaagcgcttgagatggtgactttagtacctagtgagtgctgggtgaacccagctggtgaggctgttcaggtgactgagattctggcgcagggcaggtcagaaagggggcttgggctgtgaaagatggcaggtgctggagaggaggcaggggtggggtgggagcgagttgtctgcccagaggacctggctctgggacattcccagtccctgttccctgttgggacagtctgcctctacccgtcccagctgccgttgagcgccctgggttccgctagggcctcccttctccctcaggagaccaggggcagaccagggcttgtgcctggcatgaggtctcttaagtgacccgttcccccttcacccagcaccgtttgttgagggcctgccatatctgggccccgagtacccagtctgtagggaaagtggacatccatactcaccccccaggcatggccctgggaggctgactgtgcatggctccagggaggccagggacagggccctgagcgggtgatccctgggctggacaccaaggttgagaagttaggccggcagcgtggaggggacagcactgtgggggtggcccggtgtggggaggggacatggggttttgggacggtcacaccacttcatctagacaccacagccaggcacatctgtcaggcttagttctcccatgcgccatcctcaagaggcaccagcactttatctgttgagcctttatgtggcaccaactgtgtgcactattacccggttttacagatgatggaggcccagaagcaggaggtggctggtgttaggtcacacagctaggaggcagcagaacggtggggcgctgcctgtgctcttaacccccaggccaagtcaccccatcaggcagtcaggagggctggcggcagggggtgatgtgggtgggaggtagtgccttcttggcattctcaccgcagcctgggtgccgggtgccactctgacctcagccatggcagggtcgggggatgccgatgggcgctgcacgggctctcagaggcccctcacctatggccatggccttgactgtgggggcctctgtccaccgatgatctcccttcatcccctacaggtggggcggtccagggtggtgggggcacagtggccccgggcagtgaccacagggtcctgacccgcggcccccgcaggcgggctgcatgctgttcccccacatctccccctgtgaggtgcgcgtgctcatgctcctgtactcgtccaagaagaagatcttcatgggcctcatcccctacgaccagagcggcttcgtcagtgccatccggcaggtcatcaccacccgcaagcaggtgtgccagccaagcacagcccctctggggacagagggggattagaccccactgccctggttgggcagccagacttggtgtgggcggagtgtgatgcgatggctggagcaaggagctgcaggggagcccggaggatgccgggcgggttcccaccagggctccatggaaaagcggccactgggcggctctgcagggctggagggtgggtcttggcgcggcggcagggaagccagcggagcggggagctgggcaggggttgggatcgtcctgcggctggaaggccctgcctggtaaccacgtgtcctggtcatgccttgccagttgaggcagactctgcaggtcctgtgcaccaggtgagggccgggacctgtctcaggccactggggagccatggggggctgtgagcagatgaggggcagggcctgttcccctgggactagagaatggacccagctggggctaacaggccaaggctcggagggagggatggcaggccccaggacagacagacaggtttcccaggagcctgggcccctcttcccaccccgttcccttccaacaggcagtgggacctggtggtgtcaactcaggcccagtccagatcgtcaacaacaagtttctggcatggagtggtgtcatggagtggcaggaggtgagcactcggcagcccagggacttgggacccccagatcctcacggactgtggctgggaggggacactggcattgggggtctccagccctgagggctcctctttgcctctcccccaaaagcccaggcctgagcccaacagtcggtccaagaggtggctgccatcccacgtctacgtgaaccagggggagatcctgtgagtgctgggctggggggtggaggcagcatccaggggagctggggcttcctgaccctcgtccctttgtgccccacaggaggaccgagcagtggccaaggaagctgtacatgcagctcatcccgcagcagctgctggtgaggggctggggccgggtgctggagcctgcacgcagtagctcttccagagggcggggctgggggcaagagcgcctccccaggtggcctgagctggctgtgagggagcggagctgagggtgctgaagcaggtgtggtgggtagctcctcaggcttggcttcaaggggtcccaggcagccagctggtggctgtgcagggactgagcggggcaggggcagccacgacctgcacctggggggctgccaagggatctgagagcggcttccacagcactccagggttgggctggttgagcggtggagatgacgtttcctgaggtagggaggacaggggagtctcagtttggtcctgggcccgggggactcagcgggctgggagccgggaggccgtggtgggagaagccagagctgggggtcccctcgcttccccgcagaccaccctagtgccgctgttccggaactcgcgcctggtccagttccacttcaccaaggacctggagacactgaagagcctgtgccggatcatggacaatggcttcgtgagtggtgccagcagacgcaggggaggggccggccagggcagagcgagcccggaccgctcacgggggcggacatgggagaggaacagagcaccatgtcccagaccagctggggagagagggtggctagtgtgggcgtgacttctgggggctctgtgctgtccccacggcactggatggggcactgaccctggttctgcgggggcctgctcctcctctgccacatcagggctgactcagcaccaactccgcgctctccactcctcagggacaggcgcccttgtcactcctggtttcccgggagcttgtgccacatcccaaaggcccattgctgggcagggagggctgtctgcccccagcaaggtcccagaatatttggcgattgtcttatctgggggaggctcagctgactcctcttctctctctcgggctcagtttctccatctgtgaggtggagaaggttggactttggtgtttctgagccctccccccgatgtccaccttccagctgggccatacttgggtaatatcccgaaactaccttaaaattaccttcgactcagtctgagtaaactgtccacgaagctgttcgtgggtggggggggcctgggtgtaggtgcttttacatgaa[207 bp omitted]aacccgggaggcagaggttgcagtgagctgagatcatgccattgtactccagcctgggcgacaagagcgaaactcagtctcaaaaaaaaaaaaaaagtttcctcaaggaaacccagaaaggctccatgtacctcagcccttgcttgtgctgggccggccgctgcagatccctcgggctcctgagttgaagccatggccggttggctcaggtggctgtggtgaggtggccccagacacagcctggcctgcccaggagctctgaaatgcaggttcttgggcccttcccgacagagcctgttggcctttggcccacccattgctcttggccaccgtgtcatcccaataagggggcccacctccagggtgggtggggggtgtgaggacagagcagttaggctgtgcctggctcatggagcccacggcatgatgccgtggttggagggatgctggtccctgtggtgctgtctggtgacaccacgccctgtgcctgccaggccggctgcgtgcacttttcctacaaagcatcgtgtgagatccgcgtgcttatgctcctgtactcttcagagaagaaaatcttcattggcctcatcccccatgaccagggcaactttgtcaacggcatccggcgtgtcattgccaaccagcagcaggtcctgcagcggaacctggagcaggagcaacagcaacgaggggtgaggtggccggcctccagggctgctcagtctccctccacccccgctgcctgctcaccactggcctctgatttctcgccgtagatgggggggtagtggttaccccgggctgggcccctccaggagtcacagatgaggcccccgcagagactggtgagtggtgaccctgtcatgtacaggagggaccctggggcatgtggggggggtggggttgggaaagaagcagggcgaccttggccttggggagagcagagcagagggagaggcagcagtcccagcggtcctaggctgtcgggaaactgcagcccagcctcagggccatgggaggtggtatccaggcctgggtggggccaggcctctgctcacagggatgtggggtcagtgcttgggagcctgtggccagcagcccccactgcacccctgcccccaggtgacacgcttctgagcaggggcccctggggacttcaactgcccagcaacatggaggatggtgtcctgaggcctccaaggacggtccccacccctctacgtttccccaataaagccttttaaaaacctgcctgccttctctgctcactgcccgatgccttgcagccccctagctctaaggtggcccagcaggctggacagcccgggaactcactgggtctggctctcggctgtccacaccctcttcccccccgaatctccagacccgcaggccttgggttcaagttcagtgtcacagaacctgagctggattttgtcctcaggggtcacacctggccttgagccagcccctcggttgaggctcgtgggctcaccagctggctctcggggggccacacagcgccctccctgtgtgttccccggctaatgtctaaagtgctcatgccaggtcccagctggactcccctcggtagggccccaccttttgttacctgaaaatgtccttaaagcctcctccatgtaagaaactggcaggcctggagcccctcccccgtggggaccaccctccttccagcaaaatgccggccaagctcaaggagaaacagcgtttattgtggaggggagctgggcggggctcagccctcggagaactggcagtacagccgccccagcctcggctccacccatagccggaacgggatctccaggatggcagagaagccttcagccagcgttggggcctcgaactgcttcctggcagtggtgggaacagtgagggacagcctggatcatgtggcccagccagtgcccctgccccctgctatccccaacagtacctgtagccatacatgaccatgtctgacacggggatatgagaggagtccgtcatctctcgaaactgtggggaacatcagaggggcggcaggcccaggggtcaggggaggaggggggtcagggggtgcagcccggggggtgtccgggctgagcgggctcacccggttgttgtggcgcgcctgctccagagtggcggtgaagaggaagcagcggcaggggacgcccgcggctcgggcacactggacgtacctgtgggggaaggagctggatgtgcaggccccgcccaccccgccgcaggccacctacggccccgcggtcacgctacctggcgcggctcgcggcgtctgggtttgtgttgtcgatggcgacccgtttcccttgcttcagggctgtctcacacgtggtcacacagcgctgccaggagcctagcgtgtcctggggacacgagaggtcacaaacagatcggcagacccagggggagagaagaccccgagcggggacggggaggcaatgatggaggaaagccgccccaaaccagttgagaggtggagatgggaactttataatagatttggggcggcaaaagcctggtcataccctgttcacgtggacatatccggccgacacgaggtgcttcttgagaaaggtggacttcccggctgtgtggggggcagtgtcggtgggtggcctaggacccaggcggggctcagggcacgcgcacaggaacaggacacttacccccagggaatcccactgcgacaaccacctccgggctggcgctcaggagggccctggactcggggaggcagagaggccctgagcgggagacagtcctctgcgaggggcgggggacacgcgtgagatgccgtccccatccccgggagccctcccatccccacccccacccccgccccagggcctcaccggatcaaaggctgggagctcgaagccggctgctggccacttgagaaagaactcctcaggcgtggcgaagggcaggccaaggttgagggcaaactaggggttgaggacgaacatcagacacaggccagggtcgggctcgggcgcggggcagggggcaggggcctcaccaggcgatcggcgcaggagaagtctttcttcttccgccccggggcccagttggccgggcgtccggctgcgtctggaacacacgggacaccccgttcccaccagctcggagggaggcgtcccagcccaccctcagcagcctccaggcccttacctcccacaaagatgctgtccccgatggatatgggcgtgccgtcgttggcctacgggagacggtagtgaggaggcccttcccacaaatgtccccccgcagcggtagcgggtccctggggctgcttcgcctggtctgtgccccacatcaggaatcatcccccgacctttcatgtcctcactctccagccactttgcaccgtgctcctggccccctcccccctccgtggtctctccacacagccccctccctccaggtctcccgacttcacctcctcccgttccccacgcggccaccggagggcacccaccctgctacagctccagcctccggcgtgccggcgcctcccaggttccccctccctcagggcaaaagcggggccctccctgtggccctgccctctcccctccctcgcttagagccagccgcatgggcctcgctgtccctaactagcccaggctagggactgcctcagggcctttgcacttgctgtcactcccacaaggggggggaccgctttccccaggtgtccacctggctccctcctttccctgccttaggccttttcctctgatgtcacctcctcagaggccatccctgcccaccacgggtgatgcctgctttctccagctccctccctcctgctgttttacacgccagtctgcccatccgcctagagtcaccgccctcgccgtgagggccctgctggagcaggccgtcccgctcactgataccttcagctcaagaatgcgctaaacttcagaacaaatgcacacacaaacgaatgaacgaaggaatgaacagcttccctactactctgatgtagaaagtctgaaagcactggtctcgtaaaccaacatctaagatgtcacagcaaaaaacagaaggagggagcgagagaggacagaggagtaaggaggccccaaccggaggccggggagcccaggagtgaggggctggagtgaggaaaaggaggggggccgggcaggctgcaagactcacctgctcctgcagatggtcccacatgcccgtcaccggcttccggtacaagcctgcgtgcgtggccaccagcacctgtggatgggagggggccaccagctttagctccccctcaagcacctactggatgccaccccagcccagaatttgtagctgatgatgggttcctatcagcatcacactgcctgaggcctccgccccgcttaccctggagtctaaagccctcgctctggatctctgtgcccccacatagctcccagcctcccttccagccatacctggaaggggacccccagcttctccaccacagcctccaccttggccttgaactcctcggctggcagcttcccgcgcccgatgctcatctggttggtgaagatcaccagctggggagcaaagggtgtcaccagacgctctgctcaccagggccttggtctgactgcggtcggaccgccacgtgcacgtgcccatgcagacaggcggctgcacataccttgtagccctcggcttccagctctcggagcttacggggaatctctgggtacaagatcctacggcaggtatgaagcggcaggggtgacccggggccagaggtggactccaggcctcactcactcccttgttttgcctcttatcacctccagtcactggggccagtgggaaagaccttcccagagcgtgtggtgatgagcgtcccgtccagatcaaagccagccacctggtgtcaccaaggaaagacaaacagcagcactgtgatacctctgaccctcctcactcacaggctgactcacaccaaccctgccaggcagggtgttatcactgccatctcacagatggggaaaccgagtcacagagcacctccatctcaagcatccgtgatgcctctgagtggggcccgacatcttaaccttactgtctcctgttactccttatgacgccagccccaggattacagtctttaaaatgggggttaatgtcttacccagcctccttcttcccctggccttcaccacctcggtgggctaataaccgtgaaaataaaagcaggagcaaagctttgggtgctaactgcatgtcaggaactatgccacgtgctttttttatggattcagcatcgtagagatgagacacatgggactcagaatgtggtggtaacagcatttgaactcaagtctctctggacataaaaaatcctcatcgtaatagctcctactgagacagtcatggtcattgctgattactgggtggtcactgtgggtaacgcaggagctgacatatatcattctccccactgcttaactgcttacaacgatccctgcatttatcattaggcccatttctcagaaaagtaagtagaggctaaaaagttgagagcacgcaacaaacgtgggattgggtcccagtctgtggcggctccctcagccctcggcgtggccctcaccttgccctggggtttcaccccagctgcggtgaacactagcaacttctccaagttctcccagccggggtttgacttccgcatacgcttcttcggcagctcagcatctctcttctcatcttgggacaccagaggggtgccaggcggagtatctggctgggattctggtgtgcgggtctcttcccagcgcagggtcagtgggtggaggccattgaccaaatacagtgtgtcccccacccccagagagccctccaaccccggcttcaactcctgggtcccggtagttgaggggttaactcccagctgcagaaagagagggaggagctgggactggctccgcccccaccgggagcttcctccaatcaaatacccagcggaaaaatcagcccttctccaccactatcagacccttaggccccacctcttcactttggaacgggctttggaacggttacaggttttcagccttgtccgaatcttttttttttttttttttttttttcccctggagatataggcttgttttgtcgcccaggctggagtgcagtggtgcaatcttggctcattgaaacctgtgcctcctgggttcaaacgattctcctgcctcagctacccgagtagctgggattacaggcacccgccaccatgccccgctaatttttgtatttttagtagagatggggtttcgccat[139 bp omitted]ctgaaacaggcaacacttctttctttactggacacatccccttctctcccagccatattttttcttttctttttttgagacaggttctcgctctgtcacccaggctgaagtacagtgtggtgatcactgctcactacacccttgacctactgggctcaagggatcctcccgcttcagcctcccgattaggaactacaaggacgcgccaccattcccgctaattttttagagagacaggt[136 bp omitted]ctgacggcttgcaattcctccccaaatcccatccccaggccttgctggcccttgcagaggcactgatacctgtttcactgccactgtccgggtctcaggatctgcgaccagctccactgaggattggaggggtggagtcaggatttgcatccttgtgtgattgggtccctcatttctggggagtgtggcctgcttcaggctatagcatccagggagtaagaggcagtttatttctacatgggattggctccttgacatgcagtagccagatagtggcactaggattgcctgacactggtccttgcaagggacagggaggtacttttctctacagaattggtttcctccttgacaaaaaatgtggctagatataggtccggggcttggcctgttaccatccatcccaacctagcgacatttacttttctccacaggatcatttttctcttgacgaaggtcgtcgcctgtttctggatttcccgatggcctgagcatcatccgcgcagtgaacatcctccctaaatcggctcgatcccctctcccccaaaggatctagctaattctaaatcaagcacaaactttatcttcctgtactccctagagagcaccttccgacttcggggctggctgcaccactgcaatcccgcgtagcagccaagcgtccctctggattgttcccgcttttgcagcaggccacaccccctccagctcaggccccgctcaccttgagttctggagcacttccggtccgtaacctgggtcaggggtcccctgcccaggaccagggcttgcccgtccgagggcaggaagatggggggcgctcccccaggggggctctcgagccacaagcggcccggggcctccacctcgcccatcctgggtgccggcctggggagcaggtaaacgggcttgagcggcgcacagccccaatttgctgcaggaagtcccgcctcctcccacatccactagaaagtttccccaccattaactgctccggaagtcccacccgctcgccttccgcgggtcgacccgtttcccaggcgacgacgcgtgctccatccctccccgagttgcaatccccactttccagcgtacaggcagagagcctcgcacatgcctccgccccgccccgtactcacccgggaccgcggcttgggctcacggccacttccgaccagggaggtcctgcccgaggtgccccgcctgcaacccggccggcggcggtcggttcctcggcggacggaaatgactcgtcccctcgtgggtggggggcggggcctggcctcctcccacagcagccacgccccttccccgactcccggcccccagggtctctcggcagccctgaccttcatctctcttgctgcaacgcgaggctcaggccggtagcggggactggatcctccgttagcagatttgcctctttccaccttgacttctaattttcatcccagggaggaagatttttttcccatctgatggtcattgtcagtcgaggaaacctccgcccccgacagcgcccctaagtccttctttggcttcaccctcgatgttctagtttcctcatctataaaaaggataatcgtttccgcttcgtggggttaccatgacgattaaaggagctaacacgtgacaaaagctttaaaaaatgggtggtag[136 bp omitted]agcctcccgagtagctgggactacaggcgcccgccaccacgcccagctaattttttgtattttgagtagagacggggtttcaccgtgttagccaggacggtctcgatctcctgatctcgtgatccgcccacctcggcctcccaaagtgctcagatccgtttaagtcttatttagtgttagcattctttcggtagtggtctggtgggactacgtttacctagtcctaatttcggacgaggttccacctgctttctaacctccagccatttttttttccctttggagaaggggtctcactgtgctgcccaggctgatctcgacctcctggtgtcatgtgatcctcccgccttggcctcccagcgtgttgggcttataggcgtgaggcaccaagcccagttgctccagtccttttataatagaagactcccggctggagttcctggctttgctggtgaatatgtgggctctgtctccaacactcacctcctcaagattgggttccatggtcacataagactgggatgctctcctccacc[137 bp omitted]atgatgaaaccctgtttctactgaaaatacaaaaattacccgggcggcagtggcgcgtaatcccagctactcgggaggttgaggcaggagaatcgcttgaacctgggcgagagtgggaccctgtctcaaaaaagtaaataaaatgggcacagtaattccaacccccagctattcactgataatcagacgctgccattcggtttcagaaaatgttgaatgaacactcacaacacacttcacatttatctcagaggtaaaactctttaatctcagagcgcccctcccaactgccgatcccccaacccctcactctctcccccacaccagggccggagagtgagggcccctgccccccaccttgggtggacgagggccctttaaggcacctgtggaggtggggggcgaggggcgggagctggtaccatcctggatgcagggacgggcttcgattggcaggctgttgtggggatggatggaaccaatgaaagggggtgccagaggcagggacagtttggggccatccctgagggggtcagggaacaagttgtcgggacgtgggcaaagacgaccccagtccccgtagtgtaaagaacgtaaattgaaggccccgggccaattctgggaagaggagggcttggccacgcccccaggaagctggagccaattgggagggagaactcaggaaaagcggacggtgactatgtagagactggtcaagccctttacaggatttgagccaatcaaaaaaagagctgtccagcgactaggggatggagccaatgccgtgcgagcaaatcccttgtcgctaggcggaaaacaaaggagttgacccatttagagcttagaactcagcgagccaatcccttaatagaaggaatctgtcgctaggcggagagagacgacagacccaatcgggaaacgggacagatgccgctcctcggcgcggcaggtcgtgggctggaaggacggcggggattggcagaggcgggacaatcttgggaatgggagacgcaaggaggccggtcccggatcggcctcagattagcaggccccgggagtggggcgggggcgtagtgtgggacggggcggacgcggcccggggcgctccctccctggacttcaatatttccgcttcagcttctggaagtcgctggtgttaagccgcggccgtggcaggtccccgaagacctgggtgtcctcggcctctcgcagcaccagcgcgcgcatgctcgccgcgatgcggtccaggtcgggcgaagagggctgcggggacggcgacggggcgaggtcagcgccggcagggcaatccccctgcacccacacgcggtccaggggtgcacccgggctccaagcccacttctagcacgtccctgccctgccacctgtgccctgcgatgcccactgccagcagtgcccctccccgtcttgctccacgtaggaacccttctacccggttcagacacctcctccacgaagcctacctgcccctctccctctccccttcttggcctaggacattgcttcctacacagtggaagtgctgttgcctgctagccattaaggctgagtgcaccgtctcatgtctgaggatctgggctggggtttcagtcatgttccaatcagacctctgccgctgacaaactatgagcaagaggttttgcttccctaggcctcagtctccccttctgaaaaatggggcggataacagggtctctgtgagggctgagataatcagctgttactgccttatcatgtggccactgcgctacagaaaagatccctcgctgtgtcagcccccgccaaggagcctgcagttctggcacctagtactgcctccactacagcccccgtcacccggagctgggcctgtcccctcgcaggatgggacccggagacccagatcaggaactggacctgagcccagtgggagaccagcccccgggcacagcacgcaagaggccagagcattcaattaactgtgttgccatgagtcgcaagcacagagagcagcagcaggtggaccccgcccgcaccaggccctgttcctggtcttcagtgctcactgcttcattgagggaggatgcacagaaaaggtcaccactgtgactgctggtttgcatataaggacactgaggcttgagggggggactgtggggacccaggcctcctccctcaaagcccacagctccttcctgaaacacacctgggttccagtcccagctctgcctctcagggaagtcacatgtcccctcagtgcctcagtttcccctctgcttcagggaggctcagtgaagggtgaggaggacccacctaggccagcagagcccagcccaggagcttcaaacaggggttgctacaaggggtgaacaggggaccagggggtgggacaaattctgcaaagggctaggaatgtgcagggtggggatgggaggtgatctgaaccctccaagcctcagtttctccactggagggcatgccaaaacacctgtgccttgcccagagcaggtgttctataaatagagacgctcctggaaaggagaggccttctctataaggcactaggacacatggtaaggctgcaattgttaaaactgcaaggctcgtgtccaagaactcgcctcttgaggttgaggggaggattcagttagcttatgggtggaaagcagcatccatgctggagggcttcctggaggaggcggctcagagcccttccagctgccctccctacctccccacatttgcccctcaccggcccattctcctcatctgatgaccgcgcctctgtcctcttctccttgaagccccagacgggcacagacacaggcagggacttggcgtactgctgtgtgggtagggctgaggctgggggcactgagcaggtgggggggccggcgggggtctcctcgctcaggctgccatctgaaagagagggtggacttcagcttctgtccctgcctttgtgtcggccgtgtgcctgccctcaggtcgggaggggaacagcctgggacactcaccatctgtactctcggggtctgactcacagaaggggggaaggtcctggagggtggcgtcctcatccatcacaaagagccctgtggatgacctgagttagaggcccaggccaggcagcacctagccatgctccatgtgtcctcctcctcagccacggccactgccacagccaccacctccacctccctgaagcttctgagacccatttccttcacctcaaaaacaacttcctctagcagcctgcctggtcatcggcaaaaaccaacccagtttctatggatctgccaccctctcagctgcacacaacgggctgctaacatgaaacctctacgatctgttcgggacaatgtgactcaaaacacagccttagagaaacatgcaatgactatgacctctgtttcacaaatggagacctggaggcccagagaagttaagtcacttgcccgaggtcccatggctactaagggacaccaccaggatttgaactcaggatgcctgcccttcaccctacacgggttttctccagcaatggtgaggaggcctgccattggtaataacaacaaacaaggacctcctagtgactgatcaaactcctactaactccgcaaagccctagcgttacagtccagcctccgggaagtgcccgacccccaaattccccccaaaacagctggctgctccctccctggcttcctcagatgttggctgcatcccagacaactctttaactcctgcttggcctcccaggcgttgtggaaacgactctggttctacccatgacctgccccagagcctcccaacccccaccgggactccagttccttggctagaccgggagccccttgagaaaaaagcccgagcctgctctgtgtccttgtgcccaccactcccagcacagagctggccccaggaccagtaaggctcagagcagggaagggactggctttagatcacacagcaagccccaggcaagcctgtctggctctggggtcctgagactgcacttctgtagaagtactctgggctaagcaggcccccaccccgacaaagcctcctgcgggcacctcaagcgctgggccgcacccgcccctgcccccaccctctcacctccattatcactaatgcccagctgctccccggaggtctctgtctctgtgggctcatcctcgtcctcctcgttgtcctctctggccagggtaggccggggtgggctgggtgtgggactgggtggctgtggtgctggtgggggcgcaggaggccgagcagcagtggcagccctgtgggccagtgcgatgtcgtggaggcaacggcgcgctgcctccgccagggctcctcgaccatgggcagcataggcacaggggcccgggcggggtggtggcggcggggccgcggtcagcagcaccagctccgtgccagtccgggcccggaagcgctcagcggcccccaccacggcctcccacagctcctcggggcgccccgacgccatccgcgccctgcgggccagagcaggacagagggggctgaggcttggcggcctacatcatcgccacccactcagagtgcccgcccgtcccctggatggcactcaccaccctccacccaccttgtcccagcggtgctgtgtgtcctccccaaacctgctactccccaggattctcaccatccagtcctcgcaggcccagaccctggcgacgtcctctgccccaacccattcctcctgccccaagtcactgtactccttcccctttggccctgccctggcctctgtgggagccgccagccacatgtgaacagggagtactggaaaggcagggagtcctagcagagagtcctagcagagaggcctctaacaataaaacctgcactgggttctgaagactgagtacaataaagccgaacgagccgggcgtggtggctcaggcctgcaaccccagcactttgggaggccgaggcaggcggatcaccgagcccaagagttcgaagccagcctgggcaaaaaaaaaaaaaaaaaggaatttcatctgctttttttactcttttaacatggtgtctagaaaatttagaattccacgtggggcttgtgttgaatttgatggatgatgccaccctgctccgtcgcccagccatcccgtcaagagtgtcctgcacaaggcccagggggttccttcagcacccggagctgatgctactcctcgccatagtcctcagggcaggccctggaggctctaggtgttctggccatccccagctcctgggccatcctgcctccacggccttccagagcctctgaggcccgaggccttcagaaaacgtggtccctgaccttgatgacttgtgctccattccccaccaacctttcactcatcctagggtggaagaaactttccctcgcccatagatccagccagtctgctccatagggggtcccacactgtctgagtggccaccttcccagcacacttccttccagagggaactggctggttctatgactgaggcctcagagagtcggggctgaaatggtgctggcgctgctctctgtgctgggaaatccacacggcttttcctacaagactgttctggcaggtcctctgttgtccctgatcccccagggtgcatcagatgacttcaggagcccatccgatgccctgggcttcctccatgagcattcatgtcacctgagcttgtgacagctgtaacctggctgcctcctgcatcagactgtgaattcccccaaggtcagggatttgtgtttgcaggacaggtcggccctaagcagacaatgcagggtgcgtctccttactgggtgagaagagcgagggcaggggggctgggtccttgccctgactctgtctcaaacctgctgtgtgaccttagatggctcactggccctctctgtgcctcattttcttccccattaaccagcgtggttgagccagagctgctgggctgcggaagacgctcttccgggaggcagtaagcacaccgccactgcacggattcaggcacagctgtggtccagcccaccagggtgaagggagcagggagtctggagtctgaatgaaatttgcaggccttttatgactcacgatcattgatgttggtgtttgctgagcacctattcagtgctgggattccacacctggcatctcacctatctgactcactcagggagttcaaagccccaagggaaggaagaggtttatccaccacctcccagaagccacgcaaggacccaagatgggatcaaccttctcatcccaccctttcacctacactatgagacaggagctttagttacagttcaccccattttacagttgcaaactcaggcccaggggcagtcagcatcttgaagggccacaactggaagaggcagggctgggacctggactcagaaagtctagatccggggcctgttctaaatcctgaccgccatcctgcctgcctttaggagggcagatattctaatccagatggaaaagtgaggctcagagagcttaggacactggcaaaaaagcacacagctacacagggcacaagtggggctgaaactgtgaggctcagagagcttaggacactggcaaaaaagcacacagctacacagggcacaagtggggctgaaactgctgactgcccagccccaaaaccccactgaactggggggtacccggtgtctcaaacacacccatgtccttcccagctgatgagggaggaaactgaggctctaagcaagaaatggctggtccaaagtcaactgcctcgccgtgctaggcctggggctctcacttccacgggcctccagcccctaatgacatgcggagaagagggggagaggaggtcccggaagagaacgtcaggatgaactctccgtgtactcaatcttggagtagccacgggattaaagagtgaaatagggtgagtgagttgtgagggctcccccaactcaggagacatgagcaaaaaggacagggcgacttccacagacctctttgccaaggtccaggggcaccctgtaatgctacccaacaggagagtagccaagacctgggggtcctccttacccttcagcttctagaggaggtcctgtttcctccaaggagctgagagatggaggaagaacccgccccgatagacgagtttcgtgtaagatcagggagagattagaggaaagtgagacgtgttccccacaggagggggagcacgatgtggctgtcctctttggatgcagggaggagggaaaagagctaaggaggagaggggtggaaccacccctcctgtcgaaattttagtaccccacaccccaagatgtgaggaacctgagcatgaacgcggtagccatggggtgagcgcctggggccacgctcagctgccccgagacctcccaacctcgcccggggtccagggaggacccactggtctaggaagaaaacaggaaatcccgcccagacggaggccaggaccggaagtcccgcctttggacgggtgaggggcgccccgaggccccccaaaccatcccccgaccccgtggacgtggtccacggcccaggtagagatcccaggcgctctggaaccgcaaggtgagactgtctacgatttgcctcaggtctgacaggacgattcccacgggcgacccccttccagcgctcagcaaaggatcgctggcagacctctgccctctgatctgtgcaggccatacccctcccgtgagccgctcgccctcccagcgccccgctgcctcaggacggccaaatcctccccacaccgcggttaacaacgccgcctccactcacgtgcccgtagccagcatggccggcccggcgccgtcaccgccctcaaaagacatggcggcgccttgcgtcacgtccgcgcagttgccccgcctcctctccgcacactccgcctcccttatcggggccgcccgagatcaagatggcggccacaggggcttcatccgaaccagttgacaagggtgacgacagcttgcccctaagaaaaatggccccgcctagagcatttccatttgcccccaacaataatggccgtcctcatatgctcaatcatgaccacagtaaacgaaggcaagcgacctgacgtccctgacccacaataaacttcttcgacaaaagtagaggaaatcggtgctcgttaacaacatggcagccaaccgggcttaatcagcccatagtgtatattggctctccctccctccaacctgctcccattcggcacgaaggctggcaaagatccaacacggcagcatttcttgcttcggtttgccaggcttcaaaatggcggctcagcccgctttctcgcgacggtgactcagaaattcgtccggggccgcttcgtttctgggggcactgacggcttcatcccgttatcctgagtccctcagtgcctcttgtggtgtacagctcctctcacctcctcttctcttatccgttcggctcttccagctgtcgcgccccgcagagagatgggacagccccgtattaacatggccttagctgaccggcttaggccatgccctcgagcaaaatggtacctccttggcttcaattccagtatacaatatggagaaggaagtgggcgtttcaaggcgtgcttgccccaggtggtgcagctctcagaccctcccacttgtttacttcgtggcgagagggcgaacactgcgcctgcgcactctccgtagccggatccaccttcagcgtctgcgccacgtgactccgatccaccctcgaggttccagtggaataacccccttctgaaaaatggtttcacccgctccttctctagaacgggtcgggccgctaccactgtccggcccggaggggaactgttttctccggaagtgacaacacgctgactaggaaaaggaggaggcggggcagtggggccttcggcggcgactatggaaggagccggctacagggtaagcactgaggacgcattccctcgcttcagtgtatgcgaaacgccccgtctagtgatcagctcttctctcaggccttggctctcgagaatccggcacggccttggcaaacaccgatctcttataaacgcgccgtcaccctcccgtccaccgccccagggaagaacctcccatggccccgcccccccggctcaggcgactccttgagccctgccccctgtggaacgcacgtcagcatccgaacgcgggctggaccattctccccgccttggtcccggggcaatggccctcccggccccgccccctgagggtggctcctccctgggcccgtccctattggctccccaggctggtcccctcgcttgggccccagccctcgctggttccccccaactcaggtggtgtttgagaagggcggagtgtacctgcacaccagcgctaagaagtatcaggaccgagactctctcatcgctggtgtcatccgtgtcgtggaaaaggtgcgctgggagggagcagggctcggacccgctccgagcgggatgcaggcggtctgggatgcaggcggcagctgtaggagtttggtctggcggtcagcagtgggacctgaagaaggctgggtgtgggaactggaatgaggggcgggactttgaaaggctgagggtagaaactgggaaagtttggaaatttgcaacggaaagttttgggaatgtggtttggggagcgcctctaaccccgcctccctccttaccctaggacaatgacgtcctcctgcactgggctcctgtagaggaggctggagattccacccaaatcctcttctccaagaaggtaggctccacccgctttgcccttctccactcgctttttttctaggtccgtgctgttgtaagtcatttgagggacctgcgtacaatcccagacctactcgtggggcatgtgtgaccctgtttaggcttgggtactctgcctctccttttgctcctctctgtgaaatgggcagaggatgcccattcaaggaaaaagagcagggagcataagacgcacggtcgtggggacggctgacccctctctccctttgcttcttgggagatccctgccagggtgcaagatgtggattcgagttgcttgaagggaaatggcatttcctctggtgccagaggacagggcctgacagcctactcacccacttcgtcactgctcccggctttcccttcgttatgtctcctgggacttcccatggctggaccccgtcctgggcaattctgagacccagagataagtcagatccagacccacctaagccctgacccttactcactttttgagaaactgatagatgaggtcgaaaacgctaggaagtgttggaactttttgcacccagacagtctgattccagatccccaacgcttcctgggagagcagacatttgagctgggactcccaggatatgaaaggacaagaaggtatttcagggacagcagaacaaccttcaaggcacacggagaagttggatgcctctgtaggggggttctttagtggggaatgagacctccattggagctgatgagttccacccaggggccggaagtcagtcggcacccacagagctagtgacgagacactggaaggctgagctgaccacctgcgctgccccagggcaggaggatgaagatgaagatgaagatgactctccaccttgctccacagccaaacacagccaaggcaccaggaagttgcgttacatcacttccgctttccaggttggcctgcatctggttggtagaatttgtcctgtgtcctggattccagctgcaaagaaacctgggaaatgtagtgtgttttttttgttgttgttattgttttttttttttttttttgacagtctcactgtctcaaaagagtgcaaagtggtatcttattgtggttttggtttgtatttacctggtgagtacaacagtgtccattgagcactccgcagcctgactgcagagccacctgctgtgtagcatggacctccccatgcagtgggagacatggggtcaagtcctggctcgctctctggctgcattgggtgaccctgagcaagtgctgtactttcttttttctttttttttttttttttttaatgagacagaatttgctcttgttgcccaggctggagtgcaatggcgccatctcagctcactgcaacctccgcctcccaggttcaagcgattttcctttctcaccctcccgagtagctgggattacaggcatgcgccaccatgcctggctaatttttttgtatttttttagtagaaacgaggtttctccata[142 bp omitted]gctatcttccagggtagcctcgaggctaagatctgaatccatggccccttactgtctgctcctttcctctcctaaggactccagtgggggtgactcatgtgcttctgaggaggaaccaacctttgaccccggctatgaacctgactgggctgtcatcagcactgtgcggccacagctctgccactcagagcccacgagaggtaggctgaggtggcggcccttgagaagcacgtgtgggccaggtaggacacatcttgccctcagtggtcacggtcccaagggctttgctgcccacaatcaagaaggccaccagtcaccaccttccagtcccaggagcatggaagtgaatgggaagacaggactgtcccagcccaggtcaacatggccagtgtctctgagactgcagccttgctcatcctactgggctcccggattggctgtgggtgctcccacaccaggcctgcccctgaggttcgaggctggtggggtgacagatgcagccagttagggtgatttgcaccatcctggggtcacacagggtgcaggggacatccagagaaggcacgtgacccctctggggaatggagattccttccaggaagaggtgatgctggagcttggcactgagggactcttgggagttttctcttctggcagagagagcagcccgtgcaagccagaggcaggcggcccccgtgtgtttagggagccgctggcctttcattgtagctcaagtgtgggattttgagtgaagaaaggttggaggtaagataggcaggggcgaaggacagacccgaggggcctcgagtgccaggttgaggaatagggcccttaccctgcaggtcgaggggtgcctaggaaggttctggaaaggtacatgtccactgggcccccttcccatcttactcatttgtgcttccaaggaatgtgaggccaggggcagaggggtggcttgtggcggggccctcaggagatgcctgtgccgaaggaacatcctgggttgtggttgataaggctgactctggcttcccacgcgcttcccccaacacagtgccgtctccctaggtgcagagcccagctgcccccagggctcctgggccttctcagtgagtctgggggagctaaagtccatccgccgctccaagccaggcctcagctgggcctacctggttctggtgacccaggctggaggttccctgcccgcactgcacttccaccgcgggggcacccgcgccctgctccgcgtcctcagccgctacctgctgttggccaggtgagctctctcccagtgctgggccttaaaccgggcccagtcccaccatggctgcagcgtgacccctcggggctgtgaaagaaacacaactcacactgatttaaaggcaggcaaagagttgaccagcacatataactaaaaagtcaaaaaggagtattgatttcaggcaggacccaggtcccaaaatgttagaaacagttatcctttttccctctgagttcgttattctctggggccccagtatccgtggcttaacaacccggctggatagaaggcacctctttccccacgttccaacaagatcccagagctgcttctcattggctcgtccctgagtcagtcacactggaccggaaggtgaaaggccctcattggccagccccgagtcatgtgcccacccctgggatccagctgtgggcctcctttaacagcattccctgaaatgaggggttgcccaggggtggttgggacgctgcagctggaaccgatgtcggccgagcacagacagcctgggacactgggcccctacctgtgcatcacctgtgcgtcacctcccgcctcccagctccccgcaggactcccgcctctaccttgtcttcccccacgactcctctgctctctccaactccttccaccacctgcagctctttgaccaggacagctccaatgtggtgtcagtgagtgtccccagcaggaggcctggcgggtgtgggcagggagggacgagaaggggcgggccgtgacctccctttggcctcgtccccagcgcttcctccaggatccctactccaccaccttcagcagcttctcccgagtgaccaacttcttccggggtgccctgcagccacagcctgagggagccgcctccgaccttcccccgccacccgacgatgagcccgagcctggattcgaggtcatttcctgtgtgagtagtgagtggaccctccctgttatttctggccgtgtctccctgggcgcatgatttcatttccctgggcctcagtttcctctttggtaaaacggggatggtaatgggacaccctcagggggtgcatgaggaaagcgctcatggctctgccagacactgtgagcacctgctcacccttattgggggacccctcctaactgggggatgacttggctgctgagccccggaagaggctgctgcctgcccctgaatgttagtcatccgtcaagctaataagctctctgagcttgtggactgaggctgggttgggtccccccaccaccccgccgagccccaggctcatttgctctttgcctgcaggtggagctggggcctcggccaaccgtggagcggggccctccagttacagaggaggagtgggcacgccacgtgggccctgaaggtcgcctgcagcaggtccctgagctgaagaaccggatcttctcgggggtgagtgccaggacaggtggaagaatggggcagggccagaacaaggccccactgagctgcctgccctcctgcacccccagggtctgagccccagcctgcggcgcgaggcctggaagttcctcctagggtacctcagctgggaaggcacagctgaggagcacaaggcccacatacgcaagaaaacgtgagttctcaggaggccctgccctgccaggcatgacacctggtacctcctagggcaccaatgggcaagttctgtggacgctggttgtgaacctgctgtatctgggcaccatcctgcgcctgtggaatacggcaatgatcaagccagacccatcctcacccctgtatggtctgtctccattgcagttttcattcctgtgccatactgttttaatgatcacagttttgcagcatgttttataacctaggagggcccgtctctcctcattcctggtgtaggttatatacctgccaggcactgaggatgcagcagtgctggacgattccctgtccctggtgccctgtccagtggggggtgacaaattttcatcaaaaggccacaaggctatgtagtgagagatgccaggaaggtgaagtgtaagggatagtggcaagaatgacgaggtgacctgcttgggtctgtgtggtcagggaggggctctgcagggctgacctgggaggtggcgccaggcttggaggtctctgggtgttgcagacagtggcggcctcacatcttgtttccctctgtcactcagggatgagtatttccgcatgaagctgcagtggaaatctgtgagccctgagcaggagcggagaaactcacttctgcatggataccgcagcctcatcggtcagtgtcaggggtggcacttagggtggatgggagcagggaaccacaggagggcctcaggcataagtgcgagtgggagatagagggagccccctgcctccccaagaccagtgagagggcatcttgggggaaagctgcatgggctgttggggaatggccctgggggagcaaggccagggacaggatgggaaagaaggggagcccagctcccttcaggcccagtctcagttctgtcaatgcctggtgatcttggcaagtgattttgcctccctgggcctcagtttcccctactgtgggaggatatagccagctggtgagtgggaggcctggcgcctcacagcaggagcatcagtgatagtttctagaaccagctctgcttctcccccagagcaaaccccgaggctgggggctgccagcaggaggagcagtgggggctggcactggtggccagcagggatgggcccccctacctttctcacctttgcaccctgtgcccggtccccgcagaaagggatgtgagccgcactgacaggaccaacaagttctacgagggtcccgagaacccggggctgggcctgctgaacgatatcctcctcacctactgcatgtatcacttcgacctcggtgggtgccaggcctggggacgggcgtggccggggctgtccaggggagcgctgcgggcttggctgcagcctgaccccatgtccccccaggctacgtccagggcatgagtgatcttctctccccgatcctctacgtcattcagaacgaggtggatgctttctggtgtttctgtggcttcatggagctcgtggtgaggcttgggtcaggggtgggacacaggcctatcgagcgatcaggtgtcctggtacctcacggggtctgctctttcccccctccttccgtcccacagcaagggaactttgaagagagccaggagaccatgaagcggcaactcgggcgactgctgctgctcctgagggtgctggaccccctgctctgcgacttcctgggtatgtctctcgggagggtgggcaggagacaatggggccatagaccttgccagattctctggtagcagccacagtggcatcctggacattgggtcctgatccaaacaagagaaacatccccacacaacctagaatgtagaggcagaattgctgtttgaagcaaaacttcaccaaatgcagacacgcaggaatgctgactcaccccgtcctcatgctcacctagatcctgtttgggctttgcctttggcttaacctgcagggtatttttcagaaataaggacctaggcattcctgccacttcttatccccacctggctgtggctcaccttgaaccaggaatcagagactggttctctgggccctggggctgggggtgctgcatcccagctttaacatttttattcttcgaccaggcacagtggctcacacctgtaatcccagcactttgggaggccaaggcgggcggatcacttgaggtcaggagttcaagaccagcctgaccaacatggagaaactgtctctactaaaaatacaaaattagctgggcctggtggcacacgcctgtgatcccagctactcaggaggctgaggcaggagaatcgcttgaacctgggaggtggaggctgcagtgagccaagatcacaccatggcacttcagcctgggcaacaagagcgaaagaaactccatctcaaaaaaaaaaaaaaaaaaaaatatattctttattacttggtcaatgtaaaaactgcaggaaattaagatgaagaagaaaaagtaaggctgggtgtggtggttcatggttgtaatcccagtgctttgggaggccaaggtgggaggatcacgtgagccaaggagtttgagaccagcctgggcaacactgggagaccaaaaaaaattggg[132 bp omitted]tagcaaaactctgtttctactaaaaatacaaaaaaattagccagccgtggtggcgcccacctgtaatcccagctgttgggatcggctgaggcacaagaatcactcgaactggagtgggggaggtagcagtgagcagagattgtgccattgcactccagcctgggcaacagagtgagaccttgcctcaaaaaaaaaaaaaaaaaaaaaaaaggtcgggtgtggtggctcacgcctgtaatccagcactttgggaggcca[134 bp omitted]gagacaggagaatcacttgagccaaggttgcaccactgcattccagcctgggcgacagagcgagactttgtctcaaaaaaaaagaaaaaagaaagttaaagttgctgtttgatatcattgtttttcttgagtgcagatggtgatgataataagttaaacttattcatgaacatttcctcgatgctttaggacccccgggggagggagctgagatactctgtcctcaccttactgatgaggaaactaagccatagaaaagcatcacctcctagggcacaaggacagaggctgcctctgggtcattcaaagtcttctgaaacatcacttttcttgactgcgcggcattgtgtccacctgcaagatgtggtagatttgatgtaacttgacctgctggagattcgggtcctttgcagtttttcatcacggtgcatagtctgggtaatttcttctttaggttcacttccaagaagtggaattttgttcaggacagtgcttgttttcacacagctttggagagtttgtcctccgttgttactttcctcaaaggttagaatgctcagactctcactttcatttgagttaacttggggggaaaaaaaggttcaacaccagcttaattttttttttctttttgagatggagtctcgctctgttacccaggctggagtgcagtggtgtgatctcggctcactacaacctccacctcccgggttcaagcgattctcctgcctcagcctcccaaggagctggaattacaggggtgtggcaccatcccagctaatttttgtatttttagtagagatggggtttcaccacgttggccaggctgtatttttagtagagatggggttttaccatgttggcctggctggtctcgaactcctgacctcaggtgatccacccgcctcaccctcccaaagtgctggggttacaggcgtgcgccatcgcacccggccttcagcttaaatttttgctacagcgtatctaggagtgtcagttcccttagcgctcaccagcagcgggcagaggtctgtttcgtcgggcgtgctgggcgtcctgcctcccttccatgtccatggcagatgtggaagtataatagcacacttcctctggagagtgggaggaaggaggggcagggcccgcgttcagggctgctcctgcctcacctccgaggttccccagccaggcataagtcacttgcctagacttggggaaggtcttccagtcaggatgacttctcaaactctcagtcccagcgctgggcaaggctgagtgggctccatgtcatcccccagattcccaggactccggctctctctgcttctgtttccggtggctgctcatctggttcaagagggaattccccttcccggatgtccttcggctgtgggaggtgggccagccagtttgggcgagaggcctgaaggggtgggctcacctgccctgggaggttgggcggagagggacagaccctggtgggacctcaggcccaggctgggctatgacctccctccctccctctgtcccgcaccctcaggtgctgtggacagggctccctggccccaatctgcacctgctggtggcctgcgccatcctggacatggagagggacaccctcatgctgtccggcttcggctccaatgagatcctcaaggtgaggctccggccccgcccccgccctgtcccccctgagctgggcgctgcccagggccgcagtacctccggggagcaggtgtttagtgtgggattattgaaagcctggttagttgggagcgcagtgggggtggggccgcgtaggtttcccttctgccccatgccatgcctgctcccagcaaggtcctccgggcaggtgggtggggaccttccctccccgagtacgtgctcagaatgctcccggaggcctgagaagcatgtctcgcccagcgcacttctgagcccccagagggccagcccggtgtgtcttcattgtttcccagcacgaagcacagagtgggcgctcgggcggaggtggttgagtgccgactggcgcctgacccaccccctcccgcagcacatcaacgagctgactatgaagctgagcgtggaggacgtgctgacccgcgccgaggccctgcaccgccagctaaccgcctgccccgtgagtccccgtccgccccgcagcgccccgcccgaaccccgaccgacccccgcccccttctcaccttcaccttccgcttttcgcttctctcatcccgtgcctccaggagctgccccacaacgtgcaggagatcctggggctggccccgcccgcagagccccacagcccctcgcccaccgcctccccgctgcctctgtcgcccacccgggccccgcccaccccgccgccctccacggacacagccccgcagcccgacagcagcctggagatcctgcccgaggaggaggacgagggcgccgactcctaaccccgccaggcagcctcgttctgcacaggcactttagcccgagccaggcacacctgcgagggggcaggtgtgctccgccgccctgctgataagctggcttcattaaactgacacttctcatgtgcagttggcttcttgttggtggggggaaggctgccaagtgggctctgacctggttgaggaggggatggtggctgggcagagcctagggtgaatgattggggtttgtggaggcagggcttcctgagttgcctgatttgtttttttgtttgtttgttttatgagatggagtcttgctctgtcgcccaggctggagtgcagtggcagatctcggctaactgcagcctccgcctcccgggttcaagcaattaccctgcctcagcctcctgagtagctgggactacaggcgtgtgccaccacacccggctgatttttgtaattttggtagagatggggttccaccatgttgcccaggctggtcttgaactcccgacctcaggtgatctgcctgccttggcctcccaaagtgctggtattacaggcgtgagccaccgcgcccggcctgatttggggtttttggaagaggatagggtgctctgggctgtggcggcgacctggtagctgtgtgggaacacttcccggacataaccaaggtggaagggcctgcagagatgcactctggggagcctgccctcccagctgctgcttgtgagaaaaatcacctcctgttcagccactgtcagctgggctttctgttacttgcattagggcccatctggacttcagcctcgtgacagaggtggtcgctgtgattgccatttcccggtggtgcagggcgtccttccggttccctctgtgcgcaccaccccccaccctcctctggagccccactgtccaggaagaagtgaggggcagatttttgggggggctccaggatgggcgtggcgcctgctaactgcagggctagtggttccgatgcaggcaaactggggaagtaactgagccacgggggaggctggaccacacggctttttccgaaaatactttaatgcgaggtcctcgtgtgggtcgtgttttggagagataactggccttggactggagggtggctgccttcttcctttgccaggtcatgcgaggggctgctggccaccccatgcacatgcccctgcccctccatgtcagatgcgtgcccctcggggctggccgtgtccgatgcaggccccttccggctgttgatcttgatggcggcgcgcagcgccgacttgaccgccgtctccacccagccgtgcgggtaggcggtgtgctcgccggcaaagtagatgcggccataagggaccgtccagtcatccttttcggtttgccagagcgccggcggctgtaccacaaagccaccctggctgtgctggtcctccgcccaacgcttgacgacgccggtgccgtcccagagctggcgcacgacaggcccgtgcaatgccgccacgtcgtcgagcgccaagcgcaacgcctcttcccggctcaagccggcgaacgctgccgccgcgtccgaccacgtgtacgaggccagcagcagcgcgccctcgcgcggcggcgggtagaaaatcatgcgcgacgggcgatcggtgtttgagtggccgccttcaatgtgctcctcgcgccagaagggcctgcggaagcttaggaacaccttggtggccggcacgtagtgcagcctccgcagcgcctcctgcatgtggcggggcagcggcggcgagaaggtgatgcgcttcaccgccggtccgctcgccgtcagcagcaccacgtcggccttcagcaccttcagattccgcgccgggggagaggtctcgatctgcacgtgcacatcgtgcggtccctgggtcatcgccaccacgggcgcgttcaacagcacaagcccggacagcgagctcagcagcgcgcgcggcagcaggtcccagccacccacgatgcggctgtacctgcaggcggggcggggcggggtgggggcgtgacctgggctctgcggccctgcccctctgccttgccccacccaccccggcagctggcccttatgggcaccggcccgctcccccgtcatccacctctcccgaccccgcccgtccctgacatcccaaaggccgcaggagtagtggattgtgtcaccagggaccccaccacttctcccctaggccgtgtcctttatctgggaacccttagccccgcgaccatcaattaggccacgcccttcacaacagccccgcccccagacccagaggctcctcccactccctgctactttccctgattgccccccgccccccccccctgcccgccagccccgccccttactggagtctgtcgctgaggcagctgtgggcccggagggcctcggcgaagctgagatagaagaagccatcctcggacatcacgtctcccagaagctgcacggccggccggctcaggttcccctccccgagaagatattcctgcaggttgggcacaggccgaggttagggcccaggcaggctgcacccctgagagagcccctccgcagctgggcctcctggtcccatgacatgtccttggaccgtaggatcctgtccccactctctgacagatgagggaaacggaggtccagacagggggcgtgtccagcccccgggtcaggcaggaaggcggtggcaggactagggtgccaggtacccgccttctgactctctggggaaggcctcatggtcactctctttgccctgcatctcagcagaaccaagatccccacttaccaagagcgtgtgcctttcaaacttcttcatcgcctttctgcagcccagtgccttgaggtctttgagggcctgttgtggaagaagcagacatggtgctgagctgcccgggcagccagggtggaggccgggcctggagcccacactcggcttctcctcgtggttctgcccacggctggccattcaccactctcaagcccctgggcttttgcccacaccatgccctccgccttgccctccacggcaactcagatgccactgctcctccgatattaccgaactgttaacgccgcccatcccccctcattcggctggcccggctggtcacagctcatcccggttgcgtgttattttgcctatttttcagccagccagccagactgtgagctccatggaggcagggatgtgggcagctggagaggagactgggagagggtcccaggcgtgctgtgtcctcccgggggctcagtgattatttgttgcctgaatcactgtggccacggacagaagctggtcccctgtgccactggtcagtgctgacagggcatgatggctgagaagtttatctaccgtccgtcccctgcccacagccctcctgtagctccccagtgcctggagccacagaattcttgcccctcagcctcatgttcaaggcccctgctagcccctcaatgtcttttttttttttttttttttttgagatggagtgtcgctctgttgcccaggctggagtgcagtggcgccatctcagctcactgaaacctctgcctcccaggttcaagtgattctcccacctcaccctcccaagtagctgggattacaggcgcctgccaccacacctggctcatttttgcatttttagtagagacagggtttc[142 bp omitted]ctctctttgccctgaatctcagcagaaccaagatccccacttacctcagtccatgtcttttatggcagctctggttctgtgaacagtgtacagtgcccagaccacctgccctcagggctctcccacctacacatctggcacctattgtttccctgcctgtctttgcgtggcacatgagtgcgtgttcttcagcactttgttcgaatctcaccccctcccagaagccttgctgcccccatctaatttcagccttcttcttggtccacctggcttcccccttctggccaggacctcagagggaaggcagtgccccttcactcactcatgcatctcgcatctctcagactcccaaaccagtcagtgtcaaggcatagaaatgacctggacatggcccccatcctggtctagaaggggagatgggcaagtgggctctgacctgggtggggaggggatgttgggtgtggccagttcctccctaaaggtatcagggaaggcttcctggaggaggggacattggagctagttcttgagggctgagcaggagttcctgtgtggggaagggaaaggcattctggaaagggagggtgatacacaggtatagtgggtgtgaggaacacagagctgggggcatgtggaccaccatgaggacaaaaatttcttagaggagaaaagagcatgaggctggaggggtgcagaagggaaggccagtcagggctcaaagctgagcctgaaaagatcagactttgtcctggaggcagcggggagccactgggggctgtgagcagcatcactctgggtgtgtgggaagacgtttctggtaccaggctggggagactagagcctgggcagcttgagaggaggctgggggagggtccagggcagaggaggaggcctgagctggggcaggcagaggggagcagggcacaagcgtcaggcggcaggggtgggcactgatggtgggggaggtgggcgaggaggaggtcaggaggaggatggctcctaggggtctgcccgtgactgcgggatggtggggccatcgtgagatgggggcaccgggaggaggaacaggtttaggggaagcttctgagcccagtgtcctggggagggacacagatcagggtctcgggaggcagatgtctccatcagcccatggatctatgtttaagccagaggtggagactggggaggttatccaggacagtgtgtgggtgaaaggggaagaggccaaaagctgatgcagctttggg[136 bp omitted]tggtgaaaccccgtctctattaaaaatacaaaaattagctgggcgtggtggcgggcgcctgtaatcccagctactcgggaggctgaggcagagaattgcttgaacctgggaggcggaggttgcagtgagctgaaatggcgccattgcactccagcctgggtgacagagtaagactccatctcaaaaaaaaaaaaaaaaaaaaaaaaaagaagggagttgagagatgacccatatgtgtagaagcccctgggctggcccattctcattctcggatttcagtgagtaggtcagtggttagacctcatggcacacatccccttggtagaatttccatctccaccaacaggcgccccaccccatggaggggactgaagggatgccagagagaagaaaagccgggccggggcgagcttaggaggaggacagagaagtcagggcgggaggagggtgcaggcggtacccacctggttgagagccatctggtagatgtcttcgggcgagtggcccttttcctggggacgcaaggcgtagcccagcttctcgggcaccttctccaccacatagttgcgcagcttcacttcgtgcacctccgtccacgtgttcttgtcgtactgggtgaacttggtcaggttgagccccaggccctggcagagcttgtggaggatcctgatcaggggagtgggtgagtgagggccgggctccagtgggggtggcctggtccctagtgggacttggagaagaggggtgggaggggagagtagctggggaccagcatgaggctgggggtggggctagatttggggtaatcaatgctgggggatgggaatgaaatggggacaaggctggaggcctcagggcagtaccaggattaggattgggttaagagtgggatagagcccagattagaattgggaagggggacagagtttgggttggacgggggtttgagatgaagaaggggcctggggctggggtgcctgagggtgtggggatggtggagctgcaggcctggaggggccagcacaggagctggcttttgcaccaggcagggccagctggaggtctggttggaccaggtggcccgagtgttgccagaggcccagggctggcgctggaggcaagactgaggtgaggattaggcgaaggatggggttggaggctgggtttgggagtcagagtggaagttcgggcccactctggtgtgggcatggagctggggggctagttgagtctaggcacacaggtgggtgggttgctaggtcacctgtgagagctgggcatgcgcatggctcccagctccccaatccagcccgtgttctggtcccggtaggtgaagatgcggcccccgatcctgttatctgcctccaggatggtgacctgagggagtccgtggggcgaggagggcccttcagctccacccactgaccatcccctgccctctaccaccccgtgccagccccctgccttcttccatccccacagtggcccagacccagactaggagagggtccccttctgtatggaggtgggggaacagaactgagtgagcagttccagactgcaggaggaaggctgccagctagactgcaaagggacttcccagctcggggagttcggagatgacccatatgcgtagaagcccctgggctggcccattctcattctcggattgcagtgagtaggtcagtggttagacctcagggcacacatccccttggtagagtttccctctccaccaacaggcgccccaccccaggacagaggagctttgagccagtgagacttccctctgggatgaaaaacgtgggacaggaaagtctggggcctctcagtggagacatgtgacagcagggggcttgggcctcacccccagactacagggaaagatagcctctccccccacatccccacctccaccccctcaaggaggaacgcggccgtgtccctgtgcccagggactccagcctgcagcaggagggactccaggtagactgcaagcagtgcttcccaccttgtgtccagcatcgctgagcaccttggcggccaccagcccggccacaccagcgccaaccacaatcaccctctggggcttcagggtccgattgagcccccaggtcaccaccttgagcagctgctcatagtcaggatcctgcatgcatttctcgaaggggtcttggctgcgttcagccttccagtcctgggaggccaccaggctgaggaggatggggacgaggacgaggaggtgcagggctgggaggaggaggacagggtcaacggggttgtggcaggtcgggggagaggggttctactcacttgttccagagcccctcccctgcttactcacccaatggggccatgactctcggtgggagatggtgtctggggtggaggagaagggagggctgttgtgactgaggcctgtgaccactgtagcctgactctgtctcccatgggctgcccagctgctagagccggccctcccccagtcactgtcctgctctctggacctgtgtcccctaaccccattccttcagagtcccctggaccgtccctgcctccctcctcaccggtctccacctctgccacagctctctcgggttcctgtctctttctcttcttttccctctttctttcctttctttcttttttttttaacagtctttctctgccatccaggctggagtgcagtggtaagatcttggctcactgcaacctccgcctcccaggttcaagaatcctcccacttcagcctcccaagtaactgggattacagacacccataaccaaacctggctaatttttgtatttttagtagagacggggtttcgccatgttggccaggctggtctcgaactcctgaccttaggtgatccacccacctcggcctcccaaagtgctgggattccaggcatgagcccccgcgcccggcctcttttccctcttcctcatctccccagctcctgactgcttctcagtccctatttctgtgggtcctgtctctctgtccccccaccactggccgtgtcactacctccagctcttggtgacagcaggacagcgcggtcctctccactgccctccactgtctctgctgtggccctttctctccccttaaactggcagagccccgcccacccctccttttgggaaactggccgagggaaatgaaactggtttcctggagctgctctggtccaatgctcagagtctagttgaggttggagaaagggggttggaggaagttaatcagtctattcacttccttttgccccagatagttctggggtggtttggaggccagaaatagatgctcaggtaaccgtgccaacaacggggaatccccttcggtttgcccccgtccctgatcaccaggccacttgtttctatcctcccctgcactctctctgcctccttgattcccacggggacagaggggctacaggtccctgggccaggccaactttcccctccaagtccctctccgtcaggtgtcgccatgtcctgcagggccccccatggttccacttccctctccacttgccacccagagcctcagtctccccctccgttacatgggtgtagcagtggggctggcagccgtggtcccggggtcaggacgtgggctctgagcccgccctcccctctgtggctctcgtctacagctgtcaaatgacgtctacagacgtcacagtgttttaggatcaagtgagtgaatccaggttaagttctgtggccggaacctggggtagtactggaagctgctcctttggaaatgccagctgctgtggccgcaggggcactcaggggttctatgagtgaccacccggcagagggaagcgcccaggcttcacccatccctgctttaagaaccacctcagtgctcagggcagggagtggggcggcaccttggagtgggtgggggtggagaaacaatagcagggactttccttggggtgggggagagggagccaggggctccgtgaggaggaaaaccagagggaggcagattctctgcagcaagggttgggtgggggttggagggcattaacaagaaggaagatgggaaactcccgcagtaaatcaaagagggatgcggttatggccgggaggggctggggggtgaatgtgagtaacaaggcatgtgacgcaggggcgggaggccgtggcaaagggaaatgatcaaagagctggagagttcagggaccgaaagagcttgggtcagcaaaaatagtgacgagggccaggggtggctcacgcctataatcccagcactttgggaggtcgaggcaggcggatcacctgatgtcaggagttcaagaccagcctggccaacatggcaaaacctcgtctctactaaaaatataaaaattagccgggcatggtggcatacgcctgtagtcccaactactcaggaggctgggacaggagaattgcttgaacccaagaggtggaggttgcagtgagctgagatcgtgccactgcactctagcctgggtgacagagccagactccatctcaaaaaataaaaaataaaaataaaaaatagtaatgagggccgggtgcggaggctcactgctgtaatcctagcactttgggaggccgaggtgggaggattgcttgagcccaggggctcgagaccagcctggccaagatggcgaaaccctttctctaaaaaagaaaaaaatagtgacaaaaatgttcccatggcgatcacctgccttggaggccgcctggtgctcagggctttgcacccatcgtaagcctcacaatgcctgcatttgaggccaggcacagtggcttacgcctgtaatcccagcactttgggaggctgaggtgggcggatcacttgaggtcaggagttcaagaccaacctggccaaaatgatgaaaccctgtctctaccaaaaatataaaaaattagccaggcgtggtggtgcacacctgtaatcccaactactcgggacactgaggcaggagaatcgcttgaacccgggaggcagaggttgcagtgagccgagattgcaccgctgcactccagcctgggggacagagtgagactccgtctcaaaaacaaacaaacaaacaaacaaaaaaccaacaacaatgcctgcatttgatagttgaggaaactgaggcttggagatggcgagagggtgggacaggaggaccctggggcacagagaggggaaaaggcttggcctaggtctcagagtttcattcacagcgacatgtcaagtatgaacgcggcgggattggggccttattcgcctgtgcctcgacctgggtcccacagtggggaatggcagtgctggcattcctcaccaggtcgggtgggccccaggtccccggcccctgcccaatagcttgttcagtcctacagccgcataacagtggaaacaaccatggaaaggtgtggaggcccacagccaactggctcccagggcatgtcccaggagtttttgggtccccagagtgggtggggccctgcaccaatccccttgtccttatcacagagggttgttgcacaaaactcctctggccccaggcatatgtgcagctcaccttgggggacttctgggtggttgttgttgttgttttgagagatggggtcttgctgtgtcactcaggctagagcacagtggcacaatctcggctcactgcagcctcaacctcccgggctcaagcaatcctcccacctcagcctccctagtagctgggactacaggagtgcactaccacacctgttttttgttttttttgttttttttaattgagacggagtctcactctgtcacccaggctggagtgtagtggcgctatcttggctcactgcaagctccacctcctgggttcacgccattctcctgcctcagcctccagagtagctgggactacaggcacctgccaccacgtccggctaatttttgtatttttagtagagatgagatttcaccgtgttagccaggatggtctcaatctcctgactttgtgatctgcccgcctcggcctcccaaagtcctgggattacaggcgtgagccacctcgcccggccacacctggctaatttctgtgctgtttgtagagatgggattttgttatgctgcccaggctggtcttgaactcctgggcttaagcgatcctccagcctcagtctctcgagtagctgggaccacaggtgcacaccaccatgcacagctaaatttttgtactttttcatagcgacggggccttgctatgttgcccagcctggtctcaaactcctgggctcaggtgatctacctgccttggcctcccagagtgctgggattacaagcatgagccactatgcccggcccctttgagcttttttgtgcatttcacatcatcttcattcagcatgtattacttttgtaattaaagaaaaaaaaatcccaattaatgttagtttgaagcaatacatcagacaggccaggtgcccccagtgaagagcagagggcgcaagtcagctggttcaggattgatgcctttccagaatgctctgtcgcccaggctggagtacagtggtgtgatctcagttcactgtggcctctgcctcctgggttcaagtgattctcctgcctcagcctccccagtagctgggattacaggtgcgcgcaccaccacgctcagctaatttttatatttttagtagagacggggtttctccatgttggacaggctggtcttgaagtcctgacctcaggtgatccacccacctgggcctcccaaagtgctgggattacaagtgtgagccaccatgcccagcctccagaatcatttctgataatactaaggagattggtgttcaggttaaattaggtttagggatgagggtggaattagggaaaagcagtttggataggtgagtgggagacaggagggaggggaggggcaggtggagggagcggaggggaggaaaggcccagtcaagtatctgttgacttcagctggtttgggggtattctggttttttgatggagtttctggaaaataaggttaatcctcccagataatggtctttggtggggcaaatcctaccttatttggttgacttctagaaccacaatgatggtttcgatgaggtttaggtcatgtctatacagcagccagacacctggccctggccccactgggggcctcgtggcccatcagggcagctgatgctgatgagggctgcacagatgtgctggggaccgggcccctgccttacgtatatacgcattctcttctctgagtctgtccaaagaccctaagtggtcagtattaaaagtttcattggccagacgcggtggctcactcctgtcatcacagcactttgggaggccgaggtgggcgggcagatcacgagatcaggagttcgagaccagcctggccaacatggtgaaaccctgtctctactaaaaatacaaaaaaattagccgggcgtggtggcgggcatctgtaatcccagctactcaggatcctgaggcgggagaatcgctcgagcctgggaggcagaggttgcggtgagccgagaccgcgccattccactccagcctgggctacagagcgagactctgtctcaaaaacaaaacaaaacaaaacaaacacaaaactttcaccaaggcttgggtgggcagggcctgcccaggggatgacctgggacctgggtgggagtcagggggtccaggcccagattggggaagggactcagggatcggaggacagaattagtgagtcccccaatctttggcctgaccccaggacagggtcccccttcccatggaaccctccttcctgtttccagaacatcccagggccccgggtgggggcactcactgcatggctgcctctggggggctctctcagcacccatggcctttatggttagcccaggacagaagtcatcgttgggcatgtgcggaatcaaggtgaatgatggtggctttgtccttgttagtggtgcccttgttagatcagagatgccaagttcctgatattggggtcagagcagctgggaggctgtgaaaggcaggtccccctttctcagaagtgttttattatggaaactttcaaacatctaaaaccagagtgagcaggggataaacccaggtgaattcatggcttcacacagcccttgtctcactcaccctccccgccctctcactggatttattttagagcaagtcccaggcaccatattgtcttctgattttttgggactgagtctcgttctgtcacccaggccggagtgcagtggcacaatctcagctcactgcaacctccacctcctgggttcaagtggttctcctgcctcagcctcccgaggagctgcgattacaggtacaggccaccatgcccagctaattttcgtatttttagtagagacagggtttcaccatgttggctgggctggtctcgaactcctgacttcgggtgatccctcccatcttggcctcccaaagtgctgggattacaaggctgagccactgcacctgaccatgttttgctttttaaaaactacaatatcattatcatattttaagatggcagccatttcttttttttttttttttttgagatggagtctcgctcagttgcccaggctggagtgcagtggcacgatctcggctcactgcaagctccggatggcagccatttcttaatatcattaaatcaatgttcacgtttcctggaatagctcatcactgaaaaacaaaacaaaacaaaacaaaaaaacagtttaggccgggcatggtggctgacacctgcaatcacagtactttgggaggccgaggtgagcggatcacctgaggtcaggagctcaagaccagcctgggcaacatggtgaaaccccatctctactaaaaatacaaaaattagccaggcgtggtggcgggcacctctgtaatcccagctactcaggaggctgaggcaggagaatcacttgaacctgggaggcagaggtcgctatgagttgagatcatgccactccagcctaggcgacagagcgggactgcatctcaaaaaaaaaaggccaggtgtggtggctcatgcctgtaatcccagcactctgggaggccgagacaggtggatcacaaggtcaggagatcaagaccatcctggccaacatggtaaaaccctgtctctactaaaaatacgaaaattagctgggtgtggtagtgcacgcctgtagtcccagctactcaggaggctgaggcaggagaatcgcttgaacccgggaggcagagattgcagtgagccgagatcacaccactgcacgccagcctgagcaacagagcaggactctctgaaaaaaaaaacaacaacaaaacaaaaaacggttggtttgtcaagatgcaaatcacagtccatattgcatttgagtgacattgtcttggtcagtaagtgtcactatcagttctgtggattcaagggaactagggtatctgaggtgaccccagggcaccaggctagtccccatcacggcagcgcacccggtctgcttcttgcctcgggaaacctttggcgtctgagagggttcaacctgatggtgtctggaggggagacgggacaagggcgcccatgtgggtcactgtgtttgaagtcaccagggccctggtgtgcagaagccaagggtgtggtcctgtgggacaggcaggggaacagccggggtcactgaaacctggctggggggctggctgctgtgcaagaagcagacctcgcttccgagcgtgagggctttgctccctgggaggttctgtggagagccgctgccctgagtctgaggggcagatttttaaagcaccctgacatttttggggtttactgaaaacttgggagcagtggtgtgctgaagctgagtcataccaggtcataagagctgatttacattttcaggagtttttgctttgcaagccactcattactaaaaaataaattgtattgatgattagtttttactaaaaaagaataaaaagtc[132 bp omitted]actgcaatgtctgcctcccaggttcatgtgatcctcccacctcagcctccaagtatctgaaactacaggcaggagccactacgccaggctaatttttgtatttttgtagagacgaggtttcgccatgttgcccaggctggtctcaaactccagaccccaagtaatctactccccttggcctccccaaaatgtcgggattacaggcatgagccaccacacccagcccccatttgccactcttatccctaaacaggggaaagcaaagcagtaagagctgagattcacctttaaaagcctctgattccaaatttagtcaccaaatgtgttgtcttcatatgaattaatgaggaacttaaggaaaggccatttgtcaggactgggaaggaagcacatctgtgtattttcttcctggaaagggaaactgaaattacgatggagccatcacccgcggtggcacccagtcggttgctgatgctgctgcgatctcgggatccctcctagactcccccaggaggcctgttgggaccatttctcacatggctttggggcacagagcctcctgatttaatggaatcacttgtgttattcagagtggggtgctcaagatcctttggggtatgggaagaaaatgcagaacttaaaattttttttttgagatgaagtctaactttgttgcccaggctggagtgcagtggcgcgatcttggctcactgcaacctccgcctcccaggttcaagtgattctcctgagtacctgggagttacaggcacccaccaccacgccgggctaatttttgtattatttatttacttatttgagacggagtcactcttttgcccaggctggagtgcagtggcttgatctctgctcactgtaagctccgcctcccgggttcatgccattctcctgcctcagtctcccgagtagctgggactataggcgcctgccaccacacccggctaatttttttatatttttagtagagacagggtttcaccgtgttagccaggatggtctcgatctcctaacctcgtgatccgcccaccttggcctcccaaagggctgggattacaggcatgagccaccgtgcccagcccctaatttttgtatttttagaagatacggggtttcaccatgttggccaggctggtctcaaactcctgacctcaggtgatccacccgcctcggcctcccaaagctggaatttattttaaaaatataactataagaaagcaattaagctttgctaatggttaatatacaaaataggaaataatatgcaaaataataggaaaaatatacatgtacactttggaaatacatgctcaaattttctcatcatgattgtgtggcccctgccaacgaccttgtgggcattttttggtacctccagcaccagatcaggatcagctctaaaaatggatgctgaacgcacaaatgtaggtaaaatgcaaactgcttcctacctcctaaggggactcaaggcctcccttccggcagaggggacaatatgagtcaaggcctatgaactgcaggaaaaggtccctgctgtaggtgacagctttcagagagaagtagctgggttgtggggtcttcctctggtttactgctcccaccacacacacccatggtttctacttagacacaactcttgtcctccagagcccaagatggtgcaaggaaattttatttatttatttgagacgaagtttcgcttttgttgcctaggctggagtgcaatggcatgatctcggctcactgcaacctccacctctcgggttcaagcgattctcctgccacagcctcccgagtagctgggattacaggcgcccgccacttaactagccaccagctcatgtttgtatttttggtagagatgggatttctccatgttggccatgctggtctcgaactcctgacctcaggtgttctgccagccttggcctcccaaagtgctgggattacaggtgtgagccaccgcacctggccggtccaaggaaataatgactcatgatcatgacttcgggagacttttggaacctgggccatgaatctcccaagtgttgcccacagactgagatggaacaggcagcaggaggccaaaggggtacactccactccccacagcccaggagatctgagtgcttaggaccattccagtccatagagcgaggctggagggtggaggaagagcattgggcccgtgtctttagccccaggtgacaggaaggaatgctgcccatgacatctgtaaccactggaatagcgccttagggatggtactagatgacttaacatgtgtgtatattttttgagacagagtcttgctctgtcgcccaggctggagtgcagtggtgtgatcatggctcactgcagcctcaaaggcctgggcttaaatgatccttccatctcagcctcccaggtagctgggaccacagttgcgtgccaccacgcacaaccaaacttttttgtagtttttatagagacggggtttcaccatgttgcccaggctggtcttgaatccctgacctcaagtgatctgcccatcttggcctcccaaagtgctgggattacaggtgtgagccacctcgcccagccatatttgtgtatattctacgacataactgtcacaaaacacctggagcccactccccgtggcggcttcactcgtgtgttcctcttctaccactagcaccaccccttcctggagcaaaccacgatttgcatttgtctattactctgtctcatcaaacaaaagctgcttcatcgcatacccctatgtctatgcaagcactacttcatttgcttgcctgtgcgtttcatgtgaatggcacccctgcagagtctcctggaacctgctctttttactcagctttctcctcctaacatttatccatattaacagcagctgttttggtttcacaatacatttatttagaaaagcaacatacagtaataggtatttcagagaattcagcaaagtataaagacaaatacaaaagatgcttgggatacaaccgctagcttctgccttccacacacagtggattttactgtaactgactagagttactctggtgccactaagttccgagccaagtctacggccaccactggaagctgtggctatttctgtggactgacgttacactgggcttcattgttctttcatttaacaaatgtgacagggaccgggctggggacacacggggaacgacagtgggtctctgcccatgggaactcacaatctaacagcgagacgaggcacaaacggctagcacaggatagcataacaagtgccacccaaggtacaggctcagggtgctacggggacctgcaagaaggccacctgagcttcgggtagctgggaaggcttcctggaggaggtgaggcccaaggtgggggtgagcctgggccaggcaaaaggcaggcctctcggcgcccatctgtggttcctcaacaccctgtgtgtgcaggcccctcagctgacctgtcttctgtgaaattcttgatcccgctctgttctattcacactgtgctgctttgccttggtggttagcatggttagctttca[134 bp omitted]tcctgggttcaagtgattctcctgcctcagc[134 bp omitted]tggccacccaaagtgctgagattacaggggtgagccactgcgccctgacttggaggttctcttacatttggtattttttcatgacacctatgactatgctttggagagagtggctgcccccacgaccctggctgggaccaagaccatcagcacttctccatcaccaggctgagccaggatgaggtgggtggtcgcagtaggtgaaaaggggccaaagatactcaaatgaaagccacagaagccacacccatgaggctgctgcctgggcagaaggcccagaataccctcctaaatggaaaaacgcaaagcacacagcgatcatgtcaagggcagtcatgtgaaagaaagaaacaaacaaacaagtatcttgccacaaccccaaactacagacaacagggcgcattcccctcatgaactccctagggacctgcgggccccagggctgctgtcgctcagtcaaaggtgatccggaagctgcgctcctgctccttgcgccggccctcgcacaccttggtcacctcctccaccttcctctgcagcagggccgagttctggtcgatccactgcagtgagtccatgtgcgcattgaggatcttgcagatctgctgcagtgggtcactggtgtcggcgggggccccggacgtgttcaggtgctcgatgatgtccttgagatcctgggccatgcgcttgagctgtgcatcgatgttctcagccagcttgtaggttttctcacgctcctcatccgcgtgctgcaggtagatggtcccgctctgctccttgaccaactcctccagtgggctcagcaggtcttccagctccttctgctgggacaggatgaagtcgagctcctggtccagcctcttctggtccagcttcaccttctccacctcgcggtgcaggctggtgatcttttctccattctcgatcagcgtgcggtcccaggcgttgacctgggtggcctgctggaggaagtgccgctcctggtcctctagctccaggctccatttgttgatcaggctctccagctgcgcgtaggtcatggcggagctggcagccgcccctgcagctgcgccagggccaggtggagcggtcacggcagctgctgtattgctggggatcccggctggcgccagtggttttaaattcaaggcaaagccggtggtgctgctgctgctggtggtggtggcggtggcggtggcagcggtggatgttgttgtggaggtgccggaagctgctccaggtgcctttaagctgaagccctgtgtcccagcagtgggggcgcccgctgtggtcacaggggtacagagggagagtccagtggtggcagatgaggttggagcagttgctattgacgcaaagaggctgggcccagtgctggtgatggtggctgtgggtgtgggagcagctggctgtgtggcacctgctgtggtggctgctggcgtggccggagtgaagggcaacgtggcaggtgccgtgggctgggctgaattccctgctgagccaatgttgaaaccggagggttgggccgtgcttccaccagtgaatgagaagcctccagatgtggtagctggagccacagaggtggtggaggggccaaacacaaagccggtgggtgctgtgccctggctggaggtgacggtgctcgatatggcattagtgaggttgctgctgcccagcccaaagccgctggggtttgccatggctggggtggcagctgtgttgctcaagttgagctttgaagcaccgatccccaaagaaaatccagttccccccgaagcaagagtcgctgttccaaaagtgaagcctgtcgtctgtgtggccggagtctgggtggcaagtgagaacaggccggtggaaggggtacttgtggctggttggaagggagccccaaaattaaaccctccagtgccagaggtggagaaagaaaaccctgtagcaggtgtggttgttgccgtctttgcagtgccaaacgtgaacccgcctgtaggggccccagtgcctccaaaattaaacccgctcatggctccggactctggtggcggcagctactctggctcccaaagcaaatccgtcggtgtctgcagccttgggaagatttctaaagcagaggaagtgacattgtcagatggcagttttggaaaggcaagctcagtggcatgactgggcacagtcggtttggagggtggtgggatgggataatgatgcatgctgtgtaacctaaactaggctctgctacatcgagaaggatccagaagcacaaaagcacgccccaggggtcaggtacgaggagccggggtgctagggacgtgcgtggccatgttcagcccagtggaaagctcccactctgtggaggacgaggcgggagaacaggaccttggacccacctcagcctgaggagatcagatttgaggcactgccacaagcgggactaggacacacaagaacagctgtaggacctgctcccagcgtgggacccagtgaggttccctggctgactctagcagggtgtgagcggatcagctcttgccaccctgagggcctctctggacctcagagagagagatggggccgggaacccaggctggatggcagggtctgggttgctgaaggccccccaggcccacacctgcactctctaagagcaggagaggacactggaactcctcctcctaactcaggggagggtctgaaacccatgtgctcagagcacagatgcccctggctgcagtgattggctcaaggataaactgagacctgagccaggcaatcggagcctcccctggggttttctccaggcttggaaggcagctgcctccttcacctgtaggtgtggtgtggaggattgcacctgggcctcccttggacaccttctcaaccatctgcagacactgggacatcacgggagaccatgagccccaccagagatgggtgggggtgggggtgggggagggataaagagcaccccagaagacccatgggccacagtatttccattcagttcaaactgacttgattttggtaatgtctaactgaaaaatctcccagtggtgccatctatcagcaggaaggtcaaaggttacctggtgaggaaagggtgagagggagtgctgaataggggtggtttctttttcttttgggaaagggtttttttctgtcatactagctggaatgcagtgacatgatcacaactcactgcagcctcaacctcctggacccaagtgatcctcccacctcagcctcccagagtagctaggactacaggtgcatgccaccatgcgtggataatcttttttattttttgtggaaatgggatctcactctgttgccctggtcttcaactcctgggctcaagcgatcctccctctttgtcctctcaaagtgccaggactacaggcgtgagccctaaagatgatcagcagtatccttagaagacggatttgactgactggagaagggaagaaagcttgtggtgacacgagcagactggagtgatgcgctttggaatctgaagatgtgagaaagccaggagccaaggaaggcagaagcagctctaaaagctggaaatggaaagagggaggccctgtctcaaaaaaacaaaagaataatcaaagtcaagactgagaagccaagtgcctgacccagagaaacacccacgaggtctgtttcctcttccctctctccaggccagtttttaaattgcttggtgtctgtcctcaggaaatccccttccagcttgagtaagaggcaacctatctcactacccccaccccttccactgcacccttctgcttcctcacaggcccctaagttttgtttcgtctgctcctccttctccacacagccaagcaagcctggggagatgaccccagggccagctgcacacgctctgccttgtctaagccagtagatctcaatgggcgtccatcactactgactgggagcattcaaaatacacaaggctgttagctccactaagccagtctctccggggctgggatgctgtggccctggcattttcataaagctttcctgggggattctgagaaaggtctcttcaagaggccacggcaagtgcctgagcccccaggactgctggggcctggcccggcctacatccattcctcccgttgtgggacagaacaaaagtcctcactgctgagccacctcaagccggtgtgttgttactggcagctaaaggcatctgagcagctacacctacacatctcagttctcaagaactcagcttaaaaaagcttttgctattaataagttgtagctaaaatttccaagaagagcatttataaaaagctctttgcaactatgaaaaaactacaaggaaaacaatcttctatggggacttgtctggcttaacagttcaccttttttttttttttttttttgagacgggagtctcgctctgttgcccaggctggagtggaatggcatgatctcggctcactgcaacctccgcttcccgggttcaagcgattctctcgcctcagcttccaagtagctgggattacaggcgcatgccaccacgcccggctaatttttgtatttttagtagagatggggtttctccatgttggccaggctggtcttgaactcctgacctcaggtgatccgcttgcctcggcctcccaaagtgttgggattacaggcatgagccactgcgcccggccaacagttcaccatttattaagtgccacattggtttccaatactcaggtgccagggatctattcacaatggtga[137 bp omitted]catagcgagatgctgtctctacacaaaaaacacaaaaatgagttggccgtggtggcaggcgcctgtagtcgcagctacctgggaggctgagatgggaggatcactggagcccagggaggtggaggctgcagtgagctgtgattgtgccactcactccagcctgggcaacagagtgagaccccatctaaaaaagaaagaaaggagacctaccattactcaccgtttcctcaaagcaaactttggggcagatccacttgacaaatgaggaaagtgaagcccagagtggctggttaagccacggtccctgccctcaaggcagccagagtcaaatgtcagctctacaaccagggctcagggcaggcacagggccgggccacatgctgtgggagcaggttccagggagaagctgagcgttgcagatgcagcatcagccagggaaaggatggcgggggagaggcgccgtccacgcgggaggaaaggcctgtgtgaagacagggaggcccacacagcagacatgcctctgggtgctaagtgatctggtgcttctgaagggagatgtttatgtgtgaaggagtgacttggcaagcctgggctgttcaaatctgcacattccaaagagagaaaatggcccttgaccagctccaggagaatctctatgttcttgaaatgtgctgccagataagagcgcctttgtttacctggggccccaggccactctagagagtccatgttgacgctgtgacctagagtgggggctttgggtcatacagtatcagcacgacctctggaggggctggagtcagcagacctcagttcagccacacgggtgcgccatgtcctccccacaacccgggccgccactgctccgtaagcgttaccacacgctgttgcagggagaactgagcactgtccgcgggactctctctacctgcagaggagagctggaagctcgtgcctggtctcccttggggcttttgcatctctcccctttgctgttttcagtctgtatcatttctccataataaaccgtgaccgtgactgtgagtagaaagctttgctgagctctgtgagtcttagctcatcactgagccgcagggtggtcttggggactgtgggccacgtgacaggcgggagaatctggcagacccatacataccatgctaacggttcgggcgttatattgagggagccacaggcggactttatgggtgtgggggatgaaccgtaggggtagaggctggaggccaggtggcttagagaagactgggagaaggtccaggccaagagcctgaggcccgaactggaactcagagaggacagcatcacaatttgagcaaagtgttaaatttgcaccaaaaccacagggtctgtccaggttaacagtgacaggccaggcatgatggctcacacctgtaatcccagtactttcggaggccaaggcaggaggattgcttaagcccaggagtttgaggcaaaaaacaaaaaacaaaaagccacaaatactagaacttgggaagtttctcacaaatgcaaactattacgagctctgatcccggaattaccacatttgccaaaggggagagtttccttaccaaagaagctgatggtgctggtggcggtggaggaagcagggaggaacccaaactgagggagtgttgcatttccagggaaaggaggagggtatgcctgggcctgtgctcagggctgggtggctgtgaccatctgtagttcacccaggcaggacacagctccagagaagcgctgccttgaggtcaccaaggaaagtgctggcagagccgccagtcccttcccttcctgcctgcctgccccaacatttacccttgagtttcaaacaacacggccgccttcacagccctgggaacccggaggaagacccgcttgggattcagatgcggaatcatctgaattcaggtgggcatatcccacccccatctgtgagaaccagggttctttgctgtcaccccagccttcggtcagctctactaccttacctccatctgtgattcttgtgccactccaagtcccagtttttttttttttttttttttttttttttttgagatggagtcttgctctgccacccaggctggagtgtggtggtgcgatcttggctcactacaacctccgcctcccgggttcaagcaattctcccacctc[134 bp omitted]tggcctcctaaagtgctgtgattacaggagtgagccactgtgcccggcccccaacccctttccttagatgcctgggacaggagtctgtgcctgggaaagaatacaggagacctcagctttggaccaaaaggaaaggaagaattaggaaggatgtgtgctatgtgtgtgggggggtagacagaaaaacggcccccaaacatgcccacactctgatccaggaccctgtcaatgtgaccttacatggcaaagggactttgcagatgtgatgaagataaagaggttaccctggcttatccacgtgagccccaggtgaccacaggggttcttcagggaggcaggagtcagagggagatgtgcctatggaagaatggactgagagacactgtgctgctggctttgaagatgagggggccacaagccaaggaacacaggcggcttcggcctctagagctaaagaaggacatagcctctcccctagagtttcccagaggaactacacaccatgcacccatttagactctggacccccagcactgtgaaaatacattcgtgttgctttaaaccactacatttgtgatgacttgttacagcagccactagaaaccaatggcggtaggttgagggacgatggagaaagaacagaatgaaatctagataggtggatgggaatacacagagcagagctggggttgagaaaggggctggggtcaggggcaggtctgcccttgtgcatggagaccaaggcggctggtacagaaaggaaagtgaggtgtgattctgaaaatccagacatcccctggtgctggggcaaccctgccaggactgtggatgtgtgtgggtggattgccactgacacccagccacgataggccatctatgatgggagggaaggacaaggttgcctccgaacacagaggaaggctaacggtggggatggtgtcggctccactgggccagatttccgtttgttccctgctgtattcgcagcacctgcagcagtgcctggtacacagtagggactcagtaacaaccatttactagggacctactgtgtaaccggcaccgtgccagagcactgcactgcagcacaccgagcccttcctgggtgggaaacaagtgcagactccccaaggccacccagcaaacagcagacccatgatgggaaaccagagctttccagggccaagtcttgacattctgcctgggacgggagagtttcattgaggaaaagatgttagaattaagtgttggccaagtgtggtggctcacatctgtaatctcagcactttgggaggctgaggtgggtggatcacctgaggtcaggagttcgagactag[256 bp omitted]accccgtctgcactaaaaatacaaaaaaaaattagccaggcgtggtggtgggtgcccgtagtcccagctactcgggaggctgaggcaggagaatggcatcaacccgggaggcggagcttgcagtaagccgagatcacaccactgcactccagcctgggagacagagcgagactccgtctcaaaaacaaaaaaacaaaaattagcctggcatggtggcgtgtgcctgtgatcccagatagaggtgggaggatgacttgagcccaggagtttgaggctgcagtgagctgtgatcatgccaccatacttcagcctgggcggctgagcgagaccccgtctcaaacaaataaaaaagttctgggaggcacttgaacaaaggcccatggcattcggctgacagccacctggtggcactgctgacaacgcagagcccagatgcaagacggacagggtgcggagctgtctccgtgggacctcccctttccccatggaattcgttatttcagatttgggggaagtatgaccggtggaaccagagagaccagaacagggcagaaaagagcagagagtgagggagtggagaggagagaaacaaggggagatcagagatgggctgggctcagcccagggaaatttgattcctgctgaggctcagacgccgtcctccaacactgccttccctcacttgccctcccgtgggaacctctggccaggaccatctccatgagtgctagtgctgggattctccgtctgcaaactccacaagtctaactactctgcttcttaaccgtctcctgaatcagttcctctttcctttgcgtcaaagaaaatccccctaaaccttgaataacagatcagctccaagtctgcccttcaagaactgaagtcaactgaccaacaccttcctaagtggaccttagccaaggcagatgctcaagcggtccaggccaaatggccagaccagagtgccttgggagcatgagaccatgagtgggtcagggtctgggttatgttgggaaagactcaccgagactctgtgtgggaggagtgaggagactgttgcagtcgcctggcgggagctggcggtggcctgggctttcctgtcctgctctcttacataactaccctgcctggggtatggccaaccccattggtagaaaacagagtgggccagggatggtggctcgcgcctgtaatcccagtactctggcaggccgaggtgggtggattacctgaggtcaggagttcgagaccaagctgaccaacatggtgaaacccccgtctctactaaaaatataaaaattagccaggtgtggtggtgtgtgcctgtaatcccagctactcgagaggctgaggcggaggttgcagtgagccgagatcgcactactgcactccagcctgggtgacagagcgagactctgtctaaaacaaacagacacacaaaacaaacaaacaaacaaaaacccaaagccatggagagggtctgctttcctttttctttttttttttttgagacagagtctcactctgtcatccagtgcagtggtataatcacagctcactgcagcctcgactttctgggctcaaatgattctcctgccctagcctcccgttagctgggactacaggcatacgccgccatgcccagctaatattcgattttttgtagagatggggtctcactatgttgcccaggctggtctccaactcctgggctgaagccatcctcccacctctgcctcccaaagtgccaagattacaggcacgagccaccacgtccagcgagggttgcttttctaagccaaatctgtgacatggaagagctcccctctcccacccctatatgttcacctccaccaaaaggccacctctcctccacagaaccaggtatccccaatagtagggagggaggaagggacagggatacctgtgggttttcaactgtcctctctctctcctccttaggtcacctggcattctggtcccattttcctccctgatgcctttcaacctacaggcataaccgacttgcattaaggacctgtgtggagacaaaggaacagggtgtgtgtggctgtgtgtctgtcagctcctcgggggagaagctgtgatggatcaagctgtcttccccaggctgtcactggaacttttactgcatgttcagatgtttcaatgcctaaatgttcccgtgtgctcactacccaggaggccgcaccaccctgccacaacccagtgacattggtgggcatttaaagacataaaagctaggccgggcgcagtggctcacgcctgcaatcccagcactttgggaggctgggggggggggggcggggtgtgggggggcggatcacctgaggtcgggagtttgagaccagcctgaccaacatggagaaaccccatctctacaaaaaaaaattacaaaattagccaggtatggtggtgcatgcctgtaatcccagctactcgggaggctgaggcaggagaattgcttgaacctgggaggcggaggttgcagtgagccgagatcacaccactgcactccagcctgggcaacaagagtgaaactcggtctcaaaaaaacaaactaactcattttgtgaataggtagtatgttcacattgttgtagctcaaaaggtacaaaagggaatagtgtggcctgtcttccctgagtcccacagcctcccagccctgctccctggagacaggctgctgttgcacatctttgcagagacttgctgtgcgtttaaacaaaagcgtggttggcactatccccacctgcacacaaaaggccgcctgctacatgcactgttctctactgttctttatgtatcttagaaatcgttttaagcaggcttattctcctcacccgggtagatgaggaaaccgaggccctcagagggggcgacttgcccagggtaccaaaatcctgcctctgccacttgctacacaggatggcctcaaggcagtagctaaatgatttgtggattcactgattttcaaccttctctcctgctttcccctgaagtcacctgacggctaattagcagctactttctccttcccactccccaggcccagaagctaccaaaggagctctggtcgcaggaccaacagcaattttccccacaggaaaaacgaatcagctaagacaaccatggaaaagttaggaaacagccagagagagattttaaggaagattctagaaccaccgcttgctcttaatataaaaggactggaagagatttgaggaatactctggtgccaaggcttcttcctttttggccaataacttttatttcttactcttgtattgaaagttttttcccctctacctactgcattaaaaaaaaatttttttttttctaagacaaggtctcactctgtctcccaggctggagtgcagtggtgcaatcacgctcatagcctcaacctcccgggctccagtgggcctcccacctcagcctccctaatagctgggattacacatgtgtgccaccacaccagctaattttttttttttgagacggagtctcactctgtcatcaggctggagtgcagtggcgtgatctcagctcatcgcaacctctgcctcccgggttcaagctattctcctgcctcagcctcccaagtagctgggactacaggcgcgtgccaccacacccagctaacttttgtatttttagtagagacggggtttcgccatgttggccaggatggtatgaatctctcgaccttgagatccgcccacctcggtctcccaaggtgctgggattacaggcgtgagccaccatgcccggcctaggagtttctttttagcgtgatgaaaatgttctaaaattgactgtggtgatggctgcacaactctgtcaacgtactaaagccactaagttggacactgataaatggatatggattatacagtatctcaataaagccactcaaccaaccaaccgaccaaccaaccaaccagggggtgctgggaaggggttgagaggcctccatgaggctgtggaggcggataggcgtcaggctcagagctgactttaccccgagggcaacggctcgggcagagtttctaagggcaggcccatgccttccttggggtggccggtaatgctggttgagaacaggctggggaagagcctagagctgaaacgctctggttggcggtgcaggcacaggacatcaaggcctggagagggactgaggcatcagggctgagggactctgagagcagcggacaggcgtgtgtggcgggggaggaacggcgcacacctgtgccccatccgcagcccctcttcttgtcaacatcagcttccccggggagaggcagtgatgttggtgggggaaggagggaagggcccaggccgggctgtggtggagacggttgctatggaggtttctctgggaaccaggtgaaggcagccagaagatgggggcagggtggctttcattatgagaactggaagcaaacacagccccttcctgcctcggcggacatctccacacccacatttcatggcatttctcacgcgctgggctgtttccagggcttcacctgttctcactcacttaactttcccccagcaatgtgacgaagcgaaactatcatggctcccatttataaatgagcaaactgagaaaggggagaggacttcagtcacctgcgtaaagtcccacaaccagtaagggctggcccaggtgtctggccccacagctgagctcctaaccgcaccgagcctctccaaaacatggtctttttttgctccccactgccaccaccatcaccgtcccctgcctcatccagtcccccttcccattctccagagacttcctgggccatctccatgaccttccagaccagcctgggcttcactctcaaatccaattcaggatgatccgcccgccccagctgcagacgatggcctgagacgcctgcagggaagagaggggcgtccgctgctcgccaacccccatacgttcctgctctgtggtaggtcaggaagaagagggcaaaggagtctgcatcaaactgggctaaggcctggcgctctgatggccgctgacctcaaaactctccatggggggtacccctctgcccattgagggggcacctagggagcctaggggtcccgtgaggccctcccaccatggttccccgcctctgcctctccccgcagctccgaccatgaccatccatcctatgagtgctggctgggctcaagcccgggtactttcctccgtgcccaagcaaccctgtaggaaccacatatcctgggccagacgaatgcaggagctgcctcctctggacacagcggtggctctcacctcccttccatcttggcaggatgagtgcatttgctgcgagaaagcagccccgacggcagggccctagggccccaggccaggccaccacgaccacgagggaccaagacaacaagcccactcctgaatcacgcctcaacacagacaacatgatgtccaaaccacagaaacgaccaaacacccctcctgactcagagctgctggctgtttctcaactaaccccggcggcactagctccctttgcttctcaggctctaggtcaaatagatgcgagtcatgggcttgcccctgacacagcccaactcctcaagttagcccaaacgcctccttattgaggtgccctgcgagtccctgtgggggacagtcttcctgccgcaatgagcaatgtgctcctggtggcctctggctgggggcatggggattaggaagagagtaataagacaccagccccacttccagcaggcatcctgaacctcaggaaggattctttaggcctcctcctctgctccccagaaacactgtcctcccctccttcacatgggaccgggctgtgtcggaatgaagccctactccgtctcactgcttgtaaagtccagcacagaggggaccagcctcaatcctcggagactcttggaatgagggctgggttccttttgctctctgctgtggacagagaggatgacagctgtggggaggggaagtcacagagggccagcagcctgagtcctgtccacactggtggtttgctggggttttccaggtttttctgaattacttgcctacctttaaaacttggatctcacagaaaaaaaaaaaactggatttccagcttctcccgtgaaaccagcagctttgcaccaccagcgctgccagtgttgctgcggccccggtgcctttcaggggcccaggtgcttctgggagccacccctccctctgggcctgacacagggcccaaggtggtcagcagttcaccggtccaggcctcttcccatgtcaaccccctgcccctccacactgccccaaggtagttctatgattgtgcccattttactgatgaggtgaccacaggtcggggggtacagtatcttgtcccagaccactaagcggtgagtgatggcatcctgggctctaggacactggtgtcagttgttatcagtttgctgtgtccctttttttttgcataagagctgtgactgcttctactgaagggacaagggcaggcacaagggagggaaggggctctggaggactgtgggccacgtggcagcctgtgctgtctcccagcccccgcgtcatcctctccccaactgagctggccttggcctacctgcccttgtttgccaggactcccaccttcaaccccggcacccctggcctgcgtgacccagttaccctccctggctcctctcagggacctcagtatcacattcgctggcctctgtgctgagcaactcattagaaaatgtattgatgcctacggaaatagcagcacagggcggggggttgtggggaacgtttctgggaatgaggagggccctgactttgccctcgaagcgttcgggggagcagtcacgtaggcagacatctgcacacggcggatctgaaagcagaagcaggcgtggcgagaacagagagaatcacacacagacccgggctctggcagccgccggcttcactgatgccatctccacagcgctcccacaccaggccccagagcaggaactactgctcacagggcatttccctatgccaggccccactctaggtatttcacgcacatttacacatttaatcctcaaaaccaccgtctgcaatggaccatctcatccccattttacggaggggaaactgagtcatagaaagaggatgccacttgctgagggtcacagaagtggtggagttggggtgtgaacccagcaggctggctctagggcccatgctctgacccacgctgcggaaggcagccgaggctcggcagatgagggccctgcctgcactccagtctacaactgagtgctgggctcaggaccagaaccccggtctgtctgatgcaaaactcggagccttttccatcatgccaggaggccaccgtgattgggaaagcagtgaggagttgcggcaatagcagggcgatggcacggtgcaggtgcaggcaggaatcgatagcgtctggcaactgtgagcagcagcaggcctgaggtgagggtcagggcttggagacctcccagagactacaccatgggcctcggggccctggaagctgtgcagcatggtggaggctgaggtcccatctaactggcactgtgattttcacaaccccccttacctctcgggacctcagtcttgactcctgctaacaagcctctgtgatctgaggccccttcttggcaccgagcctcagattctcagggtcctgcacgggtggctgatctccctccctctccacaccacccctactcttgctgtgcgggggttctcccttatccaaggctctgctaaccgggagcggttgccaggtgtgctggggtccccagagaatccccgaactccccgtccccgtcaaacagccagggctgatgcaacctgcctgcaaccaccgcctcactccccaagccaggcccctccgcaccgaaaaagagtccccagtagccccacccttgcttcaagccccagctcaggagttgaaggggagctcgaggctgggggaggccaggacatgagtcctgaaggggccacaggcctgggtcaggaatgtgcacacgaggggactcagggttcgaagatctggggagaagggtcgcaggcaaccactgatgaccggctatgaactagaacaggctgggaggggctggagagctaagggtgccaactggcacccactcaccctgagtccagctgctaagtctggctgggctgaagtgggtgggacccaatagctagagagaaaaggcggcaaaacggtggggaggggaagcagagtccctgcccagacacctctgcagccagcataaaccgcacatagccagcaatgcaattctcctactgaccaagctattaaaaattacccacaccgggccaggcgcggtggttcacgcctgtaataccagcactttgggaggctgaggcgggtggatcgcctgagttcgggagttcgagaccagcctgaccaacatggagaaaccccgtctctactaaaaatacaaaattagccatgtgtggtgacacatgcctgtaatcctagctactcgggaggctgaggcaggagaatctcttgaacccaggaggcagaggttgcggtgagccgagatggcaccattgcactccagcctgggcaacaagagtgaaactccgtctcaaaaaaccaaaaaaattaaaaaacaaaacaaaacaaaaaacccaggccgggcacagtggctcaggcttgtaatcctaacactttgggagggtgaggcaggaggatcgtttgagcccaggaatcaggaattcaagaccagcctgggcaacatagtaagaccctcccccccatctctactaaaaaaagccaaaaaaaaaaaaaaatagcatcctacctggccatcctctcaatatcccgcaatcccagtctgagacaaaaccaaatggaagcacattccataaaatacccaaccagcatttttccaaactgtcaaggtcatgaaggacaaggaaagtctaaaaccagtcacaggccagaggaggctgcggagccatgatgcctaaatataacgtggcatcctgaaggcatccggaaggagcagaaagggcattaagtaacaactaccaaaatcagcatcaagtgtggtcagaatcaagaatggcatttggtcaatggtaacatactgatgttgccttggttgtgacaaatgtggcaaagtaatgtaaaatgttaatggaaaaaaccaagtgaggggcatacagaaattctccgtattatctttgcaacttttctgttgagtcaatctacaattattccaaaataaaaaattttatttaaaaaataacccccttgggtacggtggctcacacctgtaatcccagcactttgggaggctgaggcaggcagatcacgaggtcatgagttcgagaccagcctgaccaacatggtgaaaccctgtatctactaaaaatataaaaattagccaggcatgatggtgcatgtctgtaatcccagctactctggagcctgaagcaggagaatggcttgaacctgggag[142 bp omitted]gcattttgggaggccgaggtgggtggatcacctgaagtcaggagttcaagaccagcctggccaacatggcaaaaccccgtctctactaaaaatacaaaaattagccaggcgtggtggtgggcgcctgtaatcccagctacttggaaggctgaggcaggagaattgcttgaatctgggaagtggaggttgaagtgagccaagatcatgccactgcactccagcctgggcgacacagcaagactctgtctcaaaaaaaccaaaccaaaccaaaccaaacccagtccccatgtacaatctagaagatcttcgtaggaaaagattctaccggcggggcgggggagatagggcacgtctgtgcgtccttaccactggcagtctgcccaacagtctacccttaattccatctgcttttgttcaaaaatctatacagcaatggaatgagaacacatccaccttaattacagcaataacaataaccacttttatgcagcacctactgtgtcccaggcgttagtctaactgctcgacacggattaactcatttaatccttgtaacagccctaagaagtaggtacttttttttttttttttttgagacgaggtctcactctgtcacccaggctgcagtgtggtggcacaatctcggcttactgcaacctccgccccaccccagggttcaagtgatcctcctgccttagcctcatgagtagctgggaccacaggtgcaaaccaccacacccgactatttttttgtatttttggtagagacagggtttcaccatgttgcccaggctggtctcgaattcctgagatcaagcaatctgcccacctcagcctcccagggtggtgggactacaggcatgagccaccgtgcctggtccagaggtaggtattcttaatgccacttcgtaccacaggggaaactgaggcacagggaagggaaatggccagggtcacacagctagtaagaggggtgcagtcaagttttgaactcatataatctggctccagagtctatgccaggtatgtataaaatttggcttcctggggccacattgaagaattgtcttaggccacacataacatacactattgatagctgatgaacttaaaaaaaaatcgcaaaaaattcgcatgttttggtaaggtttacaaatttgtgttaggctgcattcaaagctgttctaggccgcatgcaggcccacgggtgggacaagctcagtctatgctcttagctgctactctgtatactgcctcagtgataacacagcccctataggcccaagaaaatatagggcaagtgctcaaaaactggcagagtggacagtaagtgctctaagggaaggtggtcagatcccaagaaggacttcctgcccgcaacaggtaaggaaggagaaagaagcttgtgtgtaccgctcagtatcaggattcctccaccttctctggaccttgattcagtctcctaactgccacagaagggatgaaggttgaactccagctgggatgtcctgatgtggatgggacaaggtgggtttctgcaacagagaaaagacggacatccacctcggctggtggaggagggcccagtgcatgagaaggggcaagatggctaccctgtgactaaacgaaaacggagatcttccatttttggcagggttgggagatagttcctatccagtggaagctgaaggacggtttgaaaggaagccaagggcaagggatggagaaaaggacgcagctggggcctcgatgtctgaatccctgccaggggatggggcctgggcacccatcatttggaatggaagatgaggatagctggaaacagacactttagagggatgagggagacagaagaatgacagcaggtgttggacagtccaacgtctgcggctcttacaagtggtaaggaagaaatga[355 bp omitted]agttgagctctgtgcataaggcttgccagacatcgtcttatttgagtctcataaacccaccaggcgagttgatttttcttattttacagatagggaaatgaagtaagagaacttaagttatttgcccgaggccatcctggcaggtctgtatttgggagagtgctgtgactcatgctggactctaacccacgagggtttctcagagtcagcagctgggggatgaagaagtgaaaagtgactggcaggaaattctgcaagcaaggaaagggaaagagaaatgaactggtgcaggtctgcgggaagagaatgaggctggatcctcaaaatcacaggaggaagcaggcccagacctcagaggcagaaagagaaagaaaccagagcttagagtcaggaggaggaaaccagaccccggagccacaaggagagggctggatccccggctcagagggaagaggtcggatccccagctgagagggaggagggtcccggaccctaggagtgggaaggaaaggctcggatcccctgatccccaggaggaggggacccggctgcctcccggttggggccgcgcgagggcggggcgcggaaggatccgggagggccgtgctccgccacccagtatatatctgtccccagtccccggggccgcctcattccctgtcctcggatcacagtctcttctcactacagtgtcgccgcctctgcctgcgtagccccggccatggctctgtagcctcgacccctttgtgcccccggcccgtctccgcgctcaccacgcctgcgctctccgctcccaccttctttcttcagccgaggccgccgccgcctctccttgctgcagccatggagtgagtaaccgcttacctcttctccaactgcctttcccgccctttcgcagctcgtggccctctttagggagccctggggggtggggagtcgcgagcggggaatcacggtcgcgcaggcgcagaagtagtacggtgggccgaaggcgcgcggctgcgcatgcgcactgggcccggggccgggtgggagagttctagactcgatgtttgtcagcccgcgtgcagctgggcctgagcactccaggggagggtgtgttttttttttttctaaacgattcttcgtgcttggttgttcctgcgcagtagcccaccagtgccccgtagtgaaagagctgcggaccctgaatggccgcacatgcgcattgatccccaagagggcggaggtgtaaaggcaattggaccgctcgggcgacgtagcatgcgccttggccctcggcgcagagccgcgtgtggacgggtggcgttcgggtagccgttctccgcgtgccccctctaccctcctccaccctccctgccccacgttgctctggctcacagcccagcttccttccttttaaaccaggcacctgctgaggcggggactggcttagattgacagggcagaaggcgggacccagaggcaaccctctaagtgggtggggatagaaccactgtcgtcacgatgggtgggatttcggaagcacattgtgagaaggggcggggctaaaccaaccgttagttgaggggtggggtttcgatgtgacaaagaggcggggcctctggggaatcgggggaggggcggagctaaataaacaatgaggggcggggcttggaggggcagcggcagagcgaggagtgggatttgagtggataacattgctgaagggctgcggcctggggcagttcccctgggaactggtttgggatggaagctaggaaggcagtggggccaaaaggaaatattttagaggaaggggcgtggctggaagaaaatgtccctgggattgagtttttccttgaggcgaaatattctgaggtggatgggaggggcctaaggtaattcccctgggagacctttaggttttttttttctgtattgggggaaggggtggggcatcggtcctactttaggacctaaagaaattcccttgggagtgggtggggctcagagatttgggtaaagaaagggcaaatttagaattcggagaggctgaggcttagtgttctaaacggtggttggaagggggagggaggagcctcatggacgtgcctgggggtgtggcttggcttccccttgattttggccggtggatgacgctgtcctgaccacacccactcttgtctcacgcgtgtaggtcttccactttcgccttggtgcctgtcttcgcccacctgagcatcctccagagcctcgtgccagctgctggtgcagcctctcctgttgccatcagtgcccagcacctgtgctacagccatgtcactcctggcgaccctggggctggagctggacagggccctgctcccagctagtgggctgggatggctcgtagactatgggaaactccccccggcccctgcccccctggctccctatgaggtccttgggggagccctggagggcgggcttccagtggggggagagcccctggcaggtaagggcaggtggaaggtggagctggggagtggagggcaggggaagatgggggaggaagaactcatccatgtattcaataaatattgagtgcctacaatgtgccaggcactgttttaggtgctgaggatacggctgggaacaagaagaacatggtctgtgccttccagcagctcacactgtggggagtagaccagagataaattaaatgagagtgtattggaataagtcaaaaacacctagcagctgagctacaaaatgacaaaggggacctaatatagaatgggtagccagaaaaccttctccaagtaggtaacatgttgactgaggcataaatgatgggaaggaagccaggcatgatggcctgtaatcccagcactttgggaggccaagcggggagaattgctttagtccaggagttcaggacgtgggcaacatagcgagacctcatatctataggaaaaaaaaaattagccaggcatggtggctcacgcttgtagtcacagctacttgggaggctgaggtgggaggatcgcttgagcctgggaggtctaggctgcagtgagccaagatgatgccactgcactgcagcctgggcaacagagtgaaaccctatcccttaaaataaaaaaaaagtagggaaggaatgaggaaaacacccaagggaagagcattttagttggagggaactgtatatgcagaagccctcaggaggcaggaatcatttcattcattactgtatcccaaatgcttggcacatagtgggttttcaataattaatgagtaaagatgaaacaaggcatatgtgcgtgtgtatctgtgtgtgtaatgtgatctagtttgccttttaaaaagagagaatagagacaccacagatacagagtactcggtaaaggagatgttggaatggttgaagaaatgcttggttgactgttgcttgagtcattggttggttggctggttctttttttcttttttaattttttttttctcctggaccctcttatgggttaagactgattctttcattggctaatttgttgggttttggttaactggttcattggttgattaatgggttgattggttggttgactgatttatttggttggttgaccgattccctgattgattggtcgactagttcattggttggttggttggttggttggttgactgggtggttagatggttgattgttggttggttcgttgactggtttattggtttcttcactggtttgttggtttattgactggtttgatgattcagtggttagttgttttactgaatgaatgggacagatgcacctgaatgagacgtgagtcagcacccaactacgcagaagaccagcaactcagggaattttgtgtccctccccactttaatcccaggtgatggcttctctgactggatgactgagcgagttgatttcacagctctcctccctctggagcctcccttaccccccggcaccctcccccaaccttccccaaccccacctgacctggaagctatggcctccctcctcaagaaggagctggaacagatggaagacttcttcctagatgccccgcccctcccaccaccctccccgccgccactaccaccaccaccactaccaccagccccctccctccccctgtccctcccctcctttgacctcccccagccccctgtcttggatactctggacttgctggccatctactgccgcaacgaggccgggcaggaggaagtggggatgccgcctctgcccccgccacagcagccccctcctccttctccacctcaaccttctcgcctggccccctacccacatcctgccaccacccgaggggaccgcaagcaaaagaagagagaccagaacaagtcggcggctctgaggtaccgccagcggaagcgggcagagggtgaggccctggagggcgagtgccaggggctggaggcacggaatcgcgagctgaaggaacgggcagagtccgtggagcgcgagatccagtacgtcaaggacctgctcatcgaggtttacaaggcccggagccagaggacccgtagctgctagaagggcaggggtgtggcttctgggggctggtcttcagctctggcgccttcatccccctgcctctaccttcattccaaacccctctcggccgggtgcagtggcttatgcttgtaatcccagcactttgggaggccaaggcaggaggatcgtttgaggccaggaggtcaataccagcctgggcaacatagtaagaccctgtctctattaaaaaaaaaaaatcaacccttcttccccaccaaaccacccaactcctctctactcttatccttttatcctctgtctctgcttatcacctctcttgcgtatttctggatctccttccctcctttctcgtccaaatcatgaaatgtttggccttagtcaatgtctatgcccgtcacataacagccgaggcaccgaggcccacagggaagcagctgggagcttggaaacctggt
